(19) United States
(12) Patent Application Publication
(10) Pub. No.: US 2015/0259710 A1
(43) Pub. Date: Sep. 17, 2015

(54) DECARBOXYLASE PROTEINS WITH HIGH KETO-ISOVALERATE DECARBOXYLASE ACTIVITY

(71) Applicants: Catherine Asleson Dundon, Englewood, CO (US); Kevin Roberg-Perez, Englewood, CO (US); Christopher Snow, Ft. Collins, CO (US); Peter Meinhold, Denver, CO (US)

(72) Inventors: Catherine Asleson Dundon, Englewood, CO (US); Kevin Roberg-Perez, Englewood, CO (US); Christopher Snow, Ft. Collins, CO (US); Peter Meinhold, Denver, CO (US)

(73) Assignee: Gevo, Inc., Englewood, CO (US)

(21) Appl. No.: 13/561,560

(22) Filed: Jul. 30, 2012

Related U.S. Application Data
(60) Provisional application No. 61/512,810, filed on Jul. 28, 2011.

(51) Int. Cl. C12P 7/16; C12N 9/04; C12N 9/88

(52) U.S. Cl. CPC C12P 7/16; C12N 9/88; C12N 9/0006; C12Y 101/01001; C12Y 101/01086; C12Y 401/01

(57) ABSTRACT

The present invention relates to recombinant microorganisms comprising an isobutanol producing metabolic pathway and methods of using said recombinant microorganisms to produce isobutanol. In various aspects of the invention, the recombinant microorganisms may comprise at least one nucleic acid molecule encoding a polypeptide with keto-isovalerate decarboxylase (KIVD) activity, wherein said polypeptide is at least about 65%, 70%, 75%, 80%, 85%, 90%, 91%, 92%, 93%, 94%, 95%, 96%, 97%, 98%, or 99% identical to a polypeptide selected from SEQ ID NOs: 1-214. Also provided are modified decarboxylases exhibiting an improved ability to utilize α-ketoisovalerate as a substrate in various beneficial enzymatic conversions.

### CROSS REFERENCE TO RELATED APPLICATIONS

[0001] This application claims priority to U.S. Provisional Application Ser. No. 61/512,810, filed Jul. 28, 2011, which is herein incorporated by reference in its entirety for all purposes.

### TECHNICAL FIELD

[0002] Recombinant microorganisms and methods of producing such microorganisms are provided. Also provided are methods of producing beneficial metabolites including fuels and chemicals by contacting a suitable substrate with the recombinant microorganisms of the invention and enzymatic preparations therefrom.

### DESCRIPTION OF THE TEXT FILE SUBMITTED ELECTRONICALLY

[0003] The contents of the text file submitted electronically herewith are incorporated herein by reference in their entirety: A computer readable format copy of the Sequence Listing (filename: GEVO_{—}066_{—}01US_SeqList_ST25.txt, date recorded: Jul. 27, 2012, file size: 1,137 kilobytes).

### BACKGROUND

[0004] The ability of microorganisms to convert sugars to beneficial metabolites including fuels, chemicals, and amino acids has been widely described in the literature in recent years. See, e.g., Alper et al., 2009, Nature Microbiol. Rev. 7: 715-723 and McCourt et al., 2006, Amino Acids 31: 173-210. Recombinant engineering techniques have enabled the creation of microorganisms that express biosynthetic pathways capable of producing a number of useful products, including the commodity chemical, isobutanol.

[0005] Isobutanol, also a promising biofuel candidate, has been produced in recombinant microorganisms expressing a heterologous, five-step metabolic pathway (See, e.g., WO/2007/050671 to Donaldson et al., WO/2008/098227 to Liao et al., and WO/2009/103533 to Festel et al.). However, the microorganisms produced to date have fallen short of commercial relevance due to their low performance characteristics, including, for example low productivities, low titers, and low yields.

[0006] The fourth step of the isobutanol producing metabolic pathway is catalyzed by keto-isovalerate decarboxylase (KIVD), which converts alpha-ketoisovalerate to isobutyraldehyde. Because KIVD is an essential enzyme in the isobutanol production pathway, it is desirable that recombinant microorganisms engineered to produce isobutanol exhibit optimal KIVD activity. The present application addresses this need by identifying several enzymes that exhibit high activity for the conversion of alpha-ketoisovalerate to isobutyraldehyde within an isobutanol production pathway. Moreover, the enzymes identified herein have low activity using pyruvate, thereby reducing the conversion of pyruvate to the unwanted by-product ethanol in recombinant isobutanol producing microorganisms. Accordingly, this application describes methods of increasing isobutanol production through the use of recombinant microorganisms comprising enzymes with improved properties for the production of isobutanol.

### SUMMARY OF THE INVENTION

[0007] The present inventors have discovered a group of enzymes with high level activity for the conversion of alpha-ketoisovalerate to isobutyraldehyde in the isobutanol pathway. The use of one or more of these enzymes can improve production of the isobutanol in recombinant microorganisms expressing an engineered isobutanol producing metabolic pathway.

[0008] In a first aspect, the application relates to a recombinant microorganism comprising at least one nucleic acid molecule encoding a polypeptide with keto-isovalerate decarboxylase (KIVD) activity, wherein said polypeptide is at least about 65% identical to a polypeptide selected from SEQ ID NOs: 1-4. In one embodiment, the polypeptide with keto-isovalerate decarboxylase (KIVD) activity is derived from the genus Lactococcus. In a specific embodiment, the polypeptide with keto-isovalerate decarboxylase (KIVD) activity is derived from Lactococcus lactis.

[0009] In another aspect, the application relates to a recombinant microorganism comprising at least one nucleic acid molecule encoding a polypeptide with keto-isovalerate decarboxylase (KIVD) activity, wherein said polypeptide is at least about 65% identical to SEQ ID NO: 5. In one embodiment, the polypeptide with keto-isovalerate decarboxylase (KIVD) activity is derived from the genus Melissococcus. In a specific embodiment, the polypeptide with keto-isovalerate decarboxylase (KIVD) activity is derived from Melissococcus plutonius.

[0010] In yet another aspect, the application relates to a recombinant microorganism comprising at least one nucleic acid molecule encoding a polypeptide with keto-isovalerate decarboxylase (KIVD) activity, wherein said polypeptide is at least about 65% identical to SEQ ID NO: 6. In one embodiment, the polypeptide with keto-isovalerate decarboxylase (KIVD) activity is derived from the genus Listeria. In a specific embodiment, the polypeptide with keto-isovalerate decarboxylase (KIVD) activity is derived from Listeria grayi.

[0011] In yet another aspect, the application relates to a recombinant microorganism comprising at least one nucleic acid molecule encoding a polypeptide with keto-isovalerate decarboxylase (KIVD) activity, wherein said polypeptide is at least about 65% identical to a polypeptide selected from SEQ ID NOs: 7-44. In one embodiment, the polypeptide with keto-isovalerate decarboxylase (KIVD) activity is derived from a genus selected from Staphylococcus or Macrococcus. In a specific embodiment, the polypeptide with keto-isovalerate decarboxylase (KIVD) activity is derived from Staphylococcus aureus, Staphylococcus epidermidis, Staphylococcus capitis, Staphylococcus haemolyticus, Staphylococcus warneri, Staphylococcus caprae, Staphylococcus saprophyticus, Staphylococcus hominis, Staphylococcus carnosus, Staphylococcus lugdunensis, or Macrococcus caseolyticus.

[0012] In yet another aspect, the application relates to a recombinant microorganism comprising at least one nucleic acid molecule encoding a polypeptide with keto-isovalerate decarboxylase (KIVD) activity, wherein said polypeptide is at least about 65% identical to a polypeptide selected from SEQ ID NOs: 45-46. In one embodiment, the polypeptide with keto-isovalerate decarboxylase (KIVD) activity is derived from the genus Staphylococcus. In a specific embodiment, the polypeptide with keto-isovalerate decarboxylase (KIVD) activity is derived from Staphylococcus pseudintermedius.

[0013] In yet another aspect, the application relates to a recombinant microorganism comprising at least one nucleic acid molecule encoding a polypeptide with keto-isovalerate decarboxylase (KIVD) activity, wherein said polypeptide is at least about 65% identical to a polypeptide selected from SEQ ID NOs: 47-48. In one embodiment, the polypeptide with keto-isovalerate decarboxylase (KIVD) activity is derived from a genus selected from Bacillus or Clostridium. In a specific embodiment, the polypeptide with keto-isovalerate decarboxylase (KIVD) activity is derived from Bacillus cereus or Clostridium acetobutylicum.

[0014] In yet another aspect, the application relates to a recombinant microorganism comprising at least one nucleic acid molecule encoding a polypeptide with keto-isovalerate decarboxylase (KIVD) activity, wherein said polypeptide is at least about 65% identical to a polypeptide selected from SEQ ID NOs: 49-90. In one embodiment, the polypeptide with keto-isovalerate decarboxylase (KIVD) activity is derived from the genus Bacillus. In a specific embodiment, the polypeptide with keto-isovalerate decarboxylase (KIVD) activity is derived from Bacillus anthracis, Bacillus cereus, or Bacillus thuringiensis.

[0015] In yet another aspect, the application relates to a recombinant microorganism comprising at least one nucleic acid molecule encoding a polypeptide with keto-isovalerate decarboxylase (KIVD) activity, wherein said polypeptide is at least about 65% identical to a polypeptide selected from SEQ ID NOs: 91-92. In one embodiment, the polypeptide with keto-isovalerate decarboxylase (KIVD) activity is derived from the genus Helicobacter. In a specific embodiment, the polypeptide with keto-isovalerate decarboxylase (KIVD) activity is derived from Helicobacter felis or Helicobacter mustelae.

[0016] In yet another aspect, the application relates to a recombinant microorganism comprising at least one nucleic acid molecule encoding a polypeptide with keto-isovalerate decarboxylase (KIVD) activity, wherein said polypeptide is at least about 65% identical to SEQ ID NO: 93. In one embodiment, the polypeptide with keto-isovalerate decarboxylase (KIVD) activity is derived from the genus Sarcina. In a specific embodiment, the polypeptide with keto-isovalerate decarboxylase (KIVD) activity is derived from Sarcina ventriculi.

[0017] In yet another aspect, the application relates to a recombinant microorganism comprising at least one nucleic acid molecule encoding a polypeptide with keto-isovalerate decarboxylase (KIVD) activity, wherein said polypeptide is at least about 65% identical to SEQ ID NO: 94. In one embodiment, the polypeptide with keto-isovalerate decarboxylase (KIVD) activity is derived from the genus Nostoc. In a specific embodiment, the polypeptide with keto-isovalerate decarboxylase (KIVD) activity is derived from Nostoc punctiforme.

[0018] In yet another aspect, the application relates to a recombinant microorganism comprising at least one nucleic acid molecule encoding a polypeptide with keto-isovalerate decarboxylase (KIVD) activity, wherein said polypeptide is at least about 65% identical to SEQ ID NO: 95. In one embodiment, the polypeptide with keto-isovalerate decarboxylase (KIVD) activity is derived from the genus Salinispora. In a specific embodiment, the polypeptide with keto-isovalerate decarboxylase (KIVD) activity is derived from Salinispora arenicola.

[0019] In yet another aspect, the application relates to a recombinant microorganism comprising at least one nucleic acid molecule encoding a polypeptide with keto-isovalerate decarboxylase (KIVD) activity, wherein said polypeptide is at least about 65% identical to a polypeptide selected from SEQ ID NOs: 96-100. In one embodiment, the polypeptide with keto-isovalerate decarboxylase (KIVD) activity is derived from the genus Leishmania. In a specific embodiment, the polypeptide with keto-isovalerate decarboxylase (KIVD) activity is derived from Leishmania mexicana, Leishmania major, Leishmania braziliensis, Leishmania donovani, or Leishmania infantum.

[0020] In yet another aspect, the application relates to a recombinant microorganism comprising at least one nucleic acid molecule encoding a polypeptide with keto-isovalerate decarboxylase (KIVD) activity, wherein said polypeptide is at least about 65% identical to SEQ ID NO: 101. In one embodiment, the polypeptide with keto-isovalerate decarboxylase (KIVD) activity is derived from an Enterobacteriaceae. In a specific embodiment, the polypeptide with keto-isovalerate decarboxylase (KIVD) activity is derived from Enterobacteriaceae bacterium 9_{—}2_{—}54FAA.

[0021] In yet another aspect, the application relates to a recombinant microorganism comprising at least one nucleic acid molecule encoding a polypeptide with keto-isovalerate decarboxylase (KIVD) activity, wherein said polypeptide is at least about 65% identical to a polypeptide selected from SEQ ID NOs: 102-143. In one embodiment, the polypeptide with keto-isovalerate decarboxylase (KIVD) activity is derived from a genus selected from Salmonella, Klebsiella, Enterobacter, Cronobacter, or Citrobacter. In a specific embodiment, the polypeptide with keto-isovalerate decarboxylase (KIVD) activity is derived from Salmonella enterica, Klebsiella pneumoniae, Klebsiella veriicola, Klebsiella sp. 1_{—}1_{—}55, Klebsiella sp. MS 92-3, Enterobacter aerogenes, Enterobacter cancerogenus, Enterobacter sp. 638, Enterobacter cloacae, Enterobacter hormaechei, Cronobacter turicensis, or Cronobacter sakazakii.

[0022] In yet another aspect, the application relates to a recombinant microorganism comprising at least one nucleic acid molecule encoding a polypeptide with keto-isovalerate decarboxylase (KIVD) activity, wherein said polypeptide is at least about 65% identical to a polypeptide selected from SEQ ID NOs: 144-149. In one embodiment, the polypeptide with keto-isovalerate decarboxylase (KIVD) activity is derived from the genus Pantoea. In a specific embodiment, the polypeptide with keto-isovalerate decarboxylase (KIVD) activity is derived from Pantoea sp. aB, Pantoea ananatis, Pantoea sp. At-9b, Pantoea agglomerans, or Pantoea vagans.

[0023] In yet another aspect, the application relates to a recombinant microorganism comprising at least one nucleic acid molecule encoding a polypeptide with keto-isovalerate decarboxylase (KIVD) activity, wherein said polypeptide is at least about 65% identical to a polypeptide selected from SEQ ID NOs: 150-155. In one embodiment, the polypeptide with keto-isovalerate decarboxylase (KIVD) activity is derived from the genus Erwinia. In a specific embodiment, the polypeptide with keto-isovalerate decarboxylase (KIVD) activity is derived from Erwinia amylovora, Erwinia tasmaniensis, Erwinia sp. Ejp617, Erwinia billingiae, or Erwinia pyrifoliae.

[0024] In yet another aspect, the application relates to a recombinant microorganism comprising at least one nucleic acid molecule encoding a polypeptide with keto-isovalerate decarboxylase (KIVD) activity, wherein said polypeptide is at least about 65% identical to a polypeptide selected from SEQ ID NOs: 156-158. In one embodiment, the polypeptide with keto-isovalerate decarboxylase (KIVD) activity is derived from the genus Pectobacterium. In a specific embodiment, the polypeptide with keto-isovalerate decarboxylase (KIVD) activity is derived from Pectobacterium carotovorum or Pectobacterium atrosepticum.

[0025] In yet another aspect, the application relates to a recombinant microorganism comprising at least one nucleic acid molecule encoding a polypeptide with keto-isovalerate decarboxylase (KIVD) activity, wherein said polypeptide is at least about 65% identical to SEQ ID NO: 159. In one embodiment, the polypeptide with keto-isovalerate decarboxylase (KIVD) activity is derived from the genus Rahnella. In a specific embodiment, the polypeptide with keto-isovalerate decarboxylase (KIVD) activity is derived from Rahnella sp. Y9602.

[0026] In yet another aspect, the application relates to a recombinant microorganism comprising at least one nucleic acid molecule encoding a polypeptide with keto-isovalerate decarboxylase (KIVD) activity, wherein said polypeptide is at least about 65% identical to a polypeptide selected from SEQ ID NOs: 160-172. In one embodiment, the polypeptide with keto-isovalerate decarboxylase (KIVD) activity is derived from a genus selected from Yersinia, Serratia, or Nasonia. In a specific embodiment, the polypeptide with keto-isovalerate decarboxylase (KIVD) activity is derived from Yersinia aldovae, Yersinia rohdei, Yersinia enterocolitica, Yersinia kristensenii, Yersinia mollaretii, Serratia symbiotica, Serratia sp. AS12, Serratia odorifera, Serratia proteamaculans, or Nasonia vitripennis.

[0027] In yet another aspect, the application relates to a recombinant microorganism comprising at least one nucleic acid molecule encoding a polypeptide with keto-isovalerate decarboxylase (KIVD) activity, wherein said polypeptide is at least about 65% identical to SEQ ID NO: 173. In one embodiment, the polypeptide with keto-isovalerate decarboxylase (KIVD) activity is derived from the genus Kineococcus. In a specific embodiment, the polypeptide with keto-isovalerate decarboxylase (KIVD) activity is derived from Kineococcus radiotolerans.

[0028] In yet another aspect, the application relates to a recombinant microorganism comprising at least one nucleic acid molecule encoding a polypeptide with keto-isovalerate decarboxylase (KIVD) activity, wherein said polypeptide is at least about 65% identical to a polypeptide selected from SEQ ID NOs: 174-177. In one embodiment, the polypeptide with keto-isovalerate decarboxylase (KIVD) activity is derived from the genus Psychrobacter. In a specific embodiment, the polypeptide with keto-isovalerate decarboxylase (KIVD) activity is derived from Psychrobacter arcticus, Psychrobacter cryohalolentis, Psychrobacter sp. PRwf-1, or Psychrobacter sp. 1501.

[0029] In yet another aspect, the application relates to a recombinant microorganism comprising at least one nucleic acid molecule encoding a polypeptide with keto-isovalerate decarboxylase (KIVD) activity, wherein said polypeptide is at least about 65% identical to SEQ ID NO: 178. In one embodiment, the polypeptide with keto-isovalerate decarboxylase (KIVD) activity is derived from the genus Corynebacterium. In a specific embodiment, the polypeptide with keto-isovalerate decarboxylase (KIVD) activity is derived from Corynebacterium striatum.

[0030] In yet another aspect, the application relates to a recombinant microorganism comprising at least one nucleic acid molecule encoding a polypeptide with keto-isovalerate decarboxylase (KIVD) activity, wherein said polypeptide is at least about 65% identical to SEQ ID NO: 179. In one embodiment, the polypeptide with keto-isovalerate decarboxylase (KIVD) activity is derived from the genus Corynebacterium. In a specific embodiment, the polypeptide with keto-isovalerate decarboxylase (KIVD) activity is derived from Corynebacterium kroppenstedtii.

[0031] In yet another aspect, the application relates to a recombinant microorganism comprising at least one nucleic acid molecule encoding a polypeptide with keto-isovalerate decarboxylase (KIVD) activity, wherein said polypeptide is at least about 65% identical to SEQ ID NO: 180. In one embodiment, the polypeptide with keto-isovalerate decarboxylase (KIVD) activity is derived from the genus Mycobacterium. In a specific embodiment, the polypeptide with keto-isovalerate decarboxylase (KIVD) activity is derived from Mycobacterium testaceum.

[0032] In yet another aspect, the application relates to a recombinant microorganism comprising at least one nucleic acid molecule encoding a polypeptide with keto-isovalerate decarboxylase (KIVD) activity, wherein said polypeptide is at least about 65% identical to SEQ ID NO: 181. In one embodiment, the polypeptide with keto-isovalerate decarboxylase (KIVD) activity is derived from the genus Nakamurella. In a specific embodiment, the polypeptide with keto-isovalerate decarboxylase (KIVD) activity is derived from Nakamurella multipartite.

[0033] In yet another aspect, the application relates to a recombinant microorganism comprising at least one nucleic acid molecule encoding a polypeptide with keto-isovalerate decarboxylase (KIVD) activity, wherein said polypeptide is at least about 65% identical to a polypeptide selected from SEQ ID NOs: 182-183. In one embodiment, the polypeptide with keto-isovalerate decarboxylase (KIVD) activity is derived from the genus Segniliparus. In a specific embodiment, the polypeptide with keto-isovalerate decarboxylase (KIVD) activity is derived from Segniliparus rotundus or Sengiliparus rugosus.

[0034] In yet another aspect, the application relates to a recombinant microorganism comprising at least one nucleic acid molecule encoding a polypeptide with keto-isovalerate decarboxylase (KIVD) activity, wherein said polypeptide is at least about 65% identical to a polypeptide selected from SEQ ID NOs: 184-196. In one embodiment, the polypeptide with keto-isovalerate decarboxylase (KIVD) activity is derived from the genus Mycobacterium. In a specific embodiment, the polypeptide with keto-isovalerate decarboxylase (KIVD) activity is derived from Mycobacterium marinurn, Mycobacterium tuberculosis, Mycobacterium avium, Mycobacterium kansasii, Mycobacterium leprae, Mycobacterium parascrofulaceum, Mycobacterium smegmatis, Mycobacterium ulcerans, or Mycobacterium intracellulare.

[0035] In yet another aspect, the application relates to a recombinant microorganism comprising at least one nucleic acid molecule encoding a polypeptide with keto-isovalerate decarboxylase (KIVD) activity, wherein said polypeptide is at least about 65% identical to a polypeptide selected from SEQ ID NOs: 198-208. In one embodiment, the polypeptide with keto-isovalerate decarboxylase (KIVD) activity is derived from the genus Francisella. In a specific embodiment, the polypeptide with keto-isovalerate decarboxylase (KIVD) activity is derived from Francisella novicida, Francisella tularensis, or Francisella philomiragia.

[0036] In yet another aspect, the application relates to a recombinant microorganism comprising at least one nucleic acid molecule encoding a polypeptide with keto-isovalerate decarboxylase (KIVD) activity, wherein said polypeptide is at least about 65% identical to SEQ ID NO: 209. In one embodiment, the polypeptide with keto-isovalerate decarboxylase (KIVD) activity is derived from the genus Beijerinckia. In a specific embodiment, the polypeptide with keto-isovalerate decarboxylase (KIVD) activity is derived from Beijerinckia indica.

[0037] In yet another aspect, the application relates to a recombinant microorganism comprising at least one nucleic acid molecule encoding a polypeptide with keto-isovalerate decarboxylase (KIVD) activity, wherein said polypeptide is at least about 65% identical to a polypeptide selected from SEQ ID NOs: 210-211. In one embodiment, the polypeptide with keto-isovalerate decarboxylase (KIVD) activity is derived from the genus Desulfovibrio.

[0038] In yet another aspect, the application relates to a recombinant microorganism comprising at least one nucleic acid molecule encoding a polypeptide with keto-isovalerate decarboxylase (KIVD) activity, wherein said polypeptide is at least about 65% identical to a polypeptide selected from SEQ ID NOs: 212-213. In one embodiment, the polypeptide with keto-isovalerate decarboxylase (KIVD) activity is derived from the genus Edwardsiella. In a specific embodiment, the polypeptide with keto-isovalerate decarboxylase (KIVD) activity is derived from Edwardsiella tarda or Edwardsiella ictaluri.

[0039] In yet another aspect, the application relates to a recombinant microorganism comprising at least one nucleic acid molecule encoding a polypeptide with keto-isovalerate decarboxylase (KIVD) activity, wherein said polypeptide is at least about 65% identical to SEQ ID NO: 214. In one embodiment, the polypeptide with keto-isovalerate decarboxylase (KIVD) activity is derived from the genus Singuliasphaera. In a specific embodiment, the polypeptide with keto-isovalerate decarboxylase (KIVD) activity is derived from Singuliasphaera acidiphila.

[0040] In another aspect, the application relates to a decarboxylase enzyme which has been modified or mutated to increase the ability of the enzyme to preferentially utilize keto-isovalerate as its substrate. Examples of such enzymes include decarboxylase enzymes having one or more modifications or mutations at positions corresponding to amino acids selected from: (a) aspartic acid 26 of the L. lactis KIVD (SEQ ID NO: 197); (b) histidine 112 of the L. lactis KIVD (SEQ ID NO: 197); (c) histidine 113 of the L. lactis KIVD (SEQ ID NO: 197); (d) glycine 402 of the L. lactis KIVD (SEQ ID NO: 197); and (e) glutamic acid 462 of the L. lactis KIVD (SEQ ID NO: 197).

[0041] In yet another aspect, the application relates to a decarboxylase enzyme which has been modified or mutated to alter one or more substrate-specificity residues. Examples of such enzymes include decarboxylase enzymes having one or more modifications or mutations at positions corresponding to amino acids selected from: (a) serine 286 of the L. lactis KIVD (SEQ ID NO: 197); (b) glutamine 377 of the L. lactis KIVD (SEQ ID NO: 197); (c) phenylalanine 381 of the L. lactis KIVD (SEQ ID NO: 197); (d) valine 461 of the L. lactis KIVD (SEQ ID NO: 197); (e) isoleucine 465 of the L. lactis KIVD (SEQ ID NO: 197); (f) methionine 538 of the L. lactis KIVD (SEQ ID NO: 197); and (g) phenylalanine 542 of the L. lactis KIVD (SEQ ID NO: 197).

[0042] In one embodiment, the decarboxylase enzyme contains a modification or mutation at the amino acid corresponding to position 26 of the L. lactis KIVD (SEQ ID NO: 197). In another embodiment, the decarboxylase enzyme contains a modification or mutation at the amino acid corresponding to position 112 of the L. lactis KIVD (SEQ ID NO: 197). In yet another embodiment, the decarboxylase enzyme contains a modification or mutation at the amino acid corresponding to position 113 of the L. lactis KIVD (SEQ ID NO: 197). In yet another embodiment, the decarboxylase enzyme contains a modification or mutation at the amino acid corresponding to position 286 of the L. lactis KIVD (SEQ ID NO: 197). In yet another embodiment, the decarboxylase enzyme contains a modification or mutation at the amino acid corresponding to position 377 of the L. lactis KIVD (SEQ ID NO: 197). In yet another embodiment, the decarboxylase enzyme contains a modification or mutation at the amino acid corresponding to position 381 of the L. lactis KIVD (SEQ ID NO: 197). In yet another embodiment, the decarboxylase enzyme contains a modification or mutation at the amino acid corresponding to position 402 of the L. lactis KIVD (SEQ ID NO: 197). In yet another embodiment, the decarboxylase enzyme contains a modification or mutation at the amino acid corresponding to position 461 of the L. lactis KIVD (SEQ ID NO: 197). In yet another embodiment, the decarboxylase enzyme contains a modification or mutation at the amino acid corresponding to position 462 of the L. lactis KIVD (SEQ ID NO: 197). In yet another embodiment, the decarboxylase enzyme contains a modification or mutation at the amino acid corresponding to position 465 of the L. lactis KIVD (SEQ ID NO: 197). In yet another embodiment, the decarboxylase enzyme contains a modification or mutation at the amino acid corresponding to position 538 of the L. lactis KIVD (SEQ ID NO: 197). In yet another embodiment, the decarboxylase enzyme contains a modification or mutation at the amino acid corresponding to position 542 of the L. lactis KIVD (SEQ ID NO: 197).

[0043] In one embodiment, the decarboxylase enzyme contains two or more modifications or mutations at the amino acids corresponding to the positions described above. In another embodiment, the decarboxylase enzyme contains three or more modifications or mutations at the amino acids corresponding to the positions described above. In yet another embodiment, the decarboxylase enzyme contains four or more modifications or mutations at the amino acids corresponding to the positions described above. In yet another embodiment, the decarboxylase enzyme contains five or more modifications or mutations at the amino acids corresponding to the positions described above. In yet another embodiment, the decarboxylase enzyme contains six or more modifications or mutations at the amino acids corresponding to the positions described above. In yet another embodiment, the decarboxylase enzyme contains seven or more modifications or mutations at the amino acids corresponding to the positions described above. In yet another embodiment, the decarboxylase enzyme contains eight or more modifications or mutations at the amino acids corresponding to the positions described above. In yet another embodiment, the decarboxylase enzyme contains nine or more modifications or mutations at the amino acids corresponding to the positions described above. In yet another embodiment, the decarboxylase enzyme contains ten or more modifications or mutations at the amino acids corresponding to the positions described above. In yet another embodiment, the decarboxylase enzyme contains eleven or more modifications or mutations at the amino acids corresponding to the positions described above. In yet another embodiment, the decarboxylase enzyme contains twelve modifications or mutations at the amino acids corresponding to the positions described above.

[0044] In yet another aspect, the application relates to a decarboxylase enzyme which has been modified or mutated to alter one or more substrate-specificity residues. Examples of such enzymes include decarboxylase enzymes having one or more modifications or mutations at positions corresponding to amino acids selected from: (a) phenylalanine 305 of the F. novicida decarboxylase (SEQ ID NO: 198); (b) threonine 397 of the F. novicida decarboxylase (SEQ ID NO: 198); (c) serine 401 of the F. novicida decarboxylase (SEQ ID NO: 198); (d) isoleucine 481 of the F. novicida decarboxylase (SEQ ID NO: 198); (e) leucine 485 of the F. novicida decarboxylase (SEQ ID NO: 198); (f) phenylalanine 556 of the F. novicida decarboxylase (SEQ ID NO: 198); and (g) leucine 560 of the F. novicida decarboxylase (SEQ ID NO: 198).

[0045] In one embodiment, the decarboxylase enzyme contains a modification or mutation at the amino acid corresponding to position 305 of the F. novicida decarboxylase (SEQ ID NO: 198). In another embodiment, the decarboxylase enzyme contains a modification or mutation at the amino acid corresponding to position 397 of the F. novicida decarboxylase (SEQ ID NO: 198). In yet another embodiment, the decarboxylase enzyme contains a modification or mutation at the amino acid corresponding to position 401 of the F. novicida decarboxylase (SEQ ID NO: 198). In yet another embodiment, the decarboxylase enzyme contains a modification or mutation at the amino acid corresponding to position 481 of the F. novicida decarboxylase (SEQ ID NO: 198). In yet another embodiment, the decarboxylase enzyme contains a modification or mutation at the amino acid corresponding to position 481 of the F. novicida decarboxylase (SEQ ID NO: 198). In yet another embodiment, the decarboxylase enzyme contains a modification or mutation at the amino acid corresponding to position 485 of the F. novicida decarboxylase (SEQ ID NO: 198). In yet another embodiment, the decarboxylase enzyme contains a modification or mutation at the amino acid corresponding to position 556 of the F. novicida decarboxylase (SEQ ID NO: 198). In yet another embodiment, the decarboxylase enzyme contains a modification or mutation at the amino acid corresponding to position 560 of the F. novicida decarboxylase (SEQ ID NO: 198). In one embodiment, the decarboxylase enzyme contains two or more modifications or mutations at the amino acids corresponding to the positions described above. In another embodiment, the decarboxylase enzyme contains three or more modifications or mutations at the amino acids corresponding to the positions described above. In yet another embodiment, the decarboxylase enzyme contains four or more modifications or mutations at the amino acids corresponding to the positions described above. In yet another embodiment, the decarboxylase enzyme contains five or more modifications or mutations at the amino acids corresponding to the positions described above. In yet another embodiment, the decarboxylase enzyme contains six or more modifications or mutations at the amino acids corresponding to the positions described above. In yet another embodiment, the decarboxylase enzyme contains seven modifications or mutations at the amino acids corresponding to the positions described above.

[0046] In yet another aspect, the application relates to a pyruvate decarboxylase (PDC) enzyme which has been modified or mutated to alter one or more substrate-specificity residues. Examples of such enzymes include enzymes having one or more modifications or mutations at positions corresponding to amino acids selected from: (a) phenylalanine 292 of the S. cerevisiae PDC1 (SEQ ID NO: 241); (b) threonine 388 of the S. cerevisiae PDC1 (SEQ ID NO: 241); (c) alanine 392 of the S. cerevisiae PDC1 (SEQ ID NO: 241); (d) serine 408 of the S. cerevisiae PDC1 (SEQ ID NO: 241); (e) valine 410 of the S. cerevisiae PDC1 (SEQ ID NO: 241); (f) isoleucine 476 of the S. cerevisiae PDC1 (SEQ ID NO: 241); (g) glutamine 552 of the S. cerevisiae PDC1 (SEQ ID NO: 241); and (h) threonine 556 of the S. cerevisiae PDC1 (SEQ ID NO: 241). In one embodiment, the pyruvate decarboxylase enzyme to be modified is obtained from a yeast microorganism. In a further embodiment, the pyruvate decarboxylase enzyme to be modified is obtained from a yeast microorganism classified into a genera selected from the group consisting of Saccharomyces, Kluyveromyces, Candida, Pichia, Issatchenkia, Debaryomyces, Hansenula, Pachysolen, Yarrowia, Schizosaccharomyces, Tricosporon, Rhodotorula, and Myxozyma. In another further embodiment, the pyruvate decarboxylase enzyme to be modified is obtained from a Saccharomyces yeast. In an exemplary embodiment, the pyruvate decarboxylase to be modified is obtained from Saccharomyces cerevisiae. In another exemplary embodiment, the pyruvate decarboxylase to be modified is PDC1, PDC5, or PDC6 of S. cerevisiae.

[0047] In one embodiment, the pyruvate decarboxylase enzyme contains a modification or mutation at the amino acid corresponding to position 292 of the S. cerevisiae PDC1 (SEQ ID NO: 241). In another embodiment, the pyruvate decarboxylase enzyme contains a modification or mutation at the amino acid corresponding to position 388 of the S. cerevisiae PDC1 (SEQ ID NO: 241). In yet another embodiment, the pyruvate decarboxylase enzyme contains a modification or mutation at the amino acid corresponding to position 392 of the S. cerevisiae PDC1 (SEQ ID NO: 241). In yet another embodiment, the pyruvate decarboxylase enzyme contains a modification or mutation at the amino acid corresponding to position 408 of the S. cerevisiae PDC1 (SEQ ID NO: 241). In yet another embodiment, the pyruvate decarboxylase enzyme contains a modification or mutation at the amino acid corresponding to position 410 of the S. cerevisiae PDC1 (SEQ ID NO: 241). In yet another embodiment, the pyruvate decarboxylase enzyme contains a modification or mutation at the amino acid corresponding to position 476 of the S. cerevisiae PDC1 (SEQ ID NO: 241). In yet another embodiment, the pyruvate decarboxylase enzyme contains a modification or mutation at the amino acid corresponding to position 552 of the S. cerevisiae PDC1 (SEQ ID NO: 241). In yet another embodiment, the pyruvate decarboxylase enzyme contains a modification or mutation at the amino acid corresponding to position 556 of the S. cerevisiae PDC1 (SEQ ID NO: 241). In one embodiment, the pyruvate decarboxylase enzyme contains two or more modifications or mutations at the amino acids corresponding to the positions described above. In another embodiment, the pyruvate decarboxylase enzyme contains three or more modifications or mutations at the amino acids corresponding to the positions described above. In yet another embodiment, the pyruvate decarboxylase enzyme contains four or more modifications or mutations at the amino acids corresponding to the positions described above. In yet another embodiment, the pyruvate decarboxylase enzyme contains five or more modifications or mutations at the amino acids corresponding to the positions described above. In yet another embodiment, the pyruvate decarboxylase enzyme contains six or more modifications or mutations at the amino acids corresponding to the positions described above. In yet another embodiment, the pyruvate decarboxylase enzyme contains seven or more modifications or mutations at the amino acids corresponding to the positions described above. In yet another embodiment, the pyruvate decarboxylase enzyme contains eight modifications or mutations at the amino acids corresponding to the positions described above.

[0048] In another aspect, the application relates to a recombinant microorganism comprising at least one nucleic acid molecule encoding a decarboxylase enzyme having one or more modifications or mutations at positions corresponding to amino acids selected from: (a) aspartic acid 26 of the L. lactis KIVD (SEQ ID NO: 197); (b) histidine 112 of the L. lactis KIVD (SEQ ID NO: 197); (c) histidine 113 of the L. lactis KIVD (SEQ ID NO: 197); (d) glycine 402 of the L. lactis KIVD (SEQ ID NO: 197); and (e) glutamic acid 462 of the L. lactis KIVD (SEQ ID NO: 197).

[0049] In yet another aspect, the application relates to a recombinant microorganism comprising at least one nucleic acid molecule encoding a decarboxylase enzyme having one or more modifications or mutations at positions corresponding to amino acids selected from: (a) serine 286 of the L. lactis KIVD (SEQ ID NO: 197); (b) glutamine 377 of the L. lactis KIVD (SEQ ID NO: 197); (c) phenylalanine 381 of the L. lactis KIVD (SEQ ID NO: 197); (d) valine 461 of the L. lactis KIVD (SEQ ID NO: 197); (e) isoleucine 465 of the L. lactis KIVD (SEQ ID NO: 197); (f) methionine 538 of the L. lactis KIVD (SEQ ID NO: 197); and (g) phenylalanine 542 of the L. lactis KIVD (SEQ ID NO: 197).

[0050] In yet another aspect, the application relates to a recombinant microorganism comprising at least one nucleic acid molecule encoding a decarboxylase enzyme having one or more modifications or mutations at positions corresponding to amino acids selected from: (a) phenylalanine 305 of the F. novicida decarboxylase (SEQ ID NO: 198); (b) threonine 397 of the F. novicida decarboxylase (SEQ ID NO: 198); (c) serine 401 of the F. novicida decarboxylase (SEQ ID NO: 198); (d) isoleucine 481 of the F. novicida decarboxylase (SEQ ID NO: 198); (e) leucine 485 of the F. novicida decarboxylase (SEQ ID NO: 198); (f) phenylalanine 556 of the F. novicida decarboxylase (SEQ ID NO: 198); and (g) leucine 560 of the F. novicida decarboxylase (SEQ ID NO: 198).

[0051] In yet another aspect, the application relates to a recombinant microorganism comprising at least one nucleic acid molecule encoding a decarboxylase enzyme having one or more modifications or mutations at positions corresponding to amino acids selected from: (a) phenylalanine 292 of the S. cerevisiae PDC1 (SEQ ID NO: 241); (b) threonine 388 of the S. cerevisiae PDC1 (SEQ ID NO: 241); (c) alanine 392 of the S. cerevisiae PDC1 (SEQ ID NO: 241); (d) serine 408 of the S. cerevisiae PDC1 (SEQ ID NO: 241); (e) valine 410 of the S. cerevisiae PDC1 (SEQ ID NO: 241); (f) isoleucine 476 of the S. cerevisiae PDC1 (SEQ ID NO: 241); (g) glutamine 552 of the S. cerevisiae PDC1 (SEQ ID NO: 241); and (h) threonine 556 of the S. cerevisiae PDC1 (SEQ ID NO: 241).

[0052] In various embodiments described herein, the recombinant microorganism comprises an isobutanol producing metabolic pathway. In one embodiment, the isobutanol producing metabolic pathway comprises at least one exogenous gene encoding a polypeptide that catalyzes a step in the conversion of pyruvate to isobutanol. In another embodiment, the isobutanol producing metabolic pathway comprises at least two exogenous genes encoding polypeptides that catalyze steps in the conversion of pyruvate to isobutanol. In yet another embodiment, the isobutanol producing metabolic pathway comprises at least three exogenous genes encoding polypeptides that catalyze steps in the conversion of pyruvate to isobutanol. In yet another embodiment, the isobutanol producing metabolic pathway comprises at least four exogenous genes encoding polypeptides that catalyze steps in the conversion of pyruvate to isobutanol. In yet another embodiment, the isobutanol producing metabolic pathway comprises at least five exogenous genes encoding polypeptides that catalyze steps in the conversion of pyruvate to isobutanol. In yet another embodiment, all of the isobutanol producing metabolic pathway steps in the conversion of pyruvate to isobutanol are converted by exogenously encoded enzymes. In an exemplary embodiment, at least one of the exogenously encoded enzymes is a polypeptide with keto-isovalerate decarboxylase (KIVD) activity, wherein said polypeptide is at least about 65% identical to a polypeptide selected from SEQ ID NOs 1-214. In another exemplary embodiment, at least one of the exogenously encoded enzymes is a decarboxylase enzyme having one or more modifications or mutations at positions corresponding to amino acids selected from: (a) aspartic acid 26 of the L. lactis KIVD (SEQ ID NO: 197); (b) histidine 112 of the L. lactis KIVD (SEQ ID NO: 197); (c) histidine 113 of the L. lactis KIVD (SEQ ID NO: 197); (d) glycine 402 of the L. lactis KIVD (SEQ ID NO: 197); and (e) glutamic acid 462 of the L. lactis KIVD (SEQ ID NO: 197). In yet another exemplary embodiment, at least one of the exogenously encoded enzymes is a decarboxylase enzyme having one or more modifications or mutations at positions corresponding to amino acids selected from: (a) serine 286 of the L. lactis KIVD (SEQ ID NO: 197); (b) glutamine 377 of the L. lactis KIVD (SEQ ID NO: 197); (c) phenylalanine 381 of the L. lactis KIVD (SEQ ID NO: 197); (d) valine 461 of the L. lactis KIVD (SEQ ID NO: 197); (e) isoleucine 465 of the L. lactis KIVD (SEQ ID NO: 197); (f) methionine 538 of the L. lactis KIVD (SEQ ID NO: 197); and (g) phenylalanine 542 of the L. lactis KIVD (SEQ ID NO: 197). In yet another exemplary embodiment, at least one of the exogenously encoded enzymes is a decarboxylase enzyme having one or more modifications or mutations at positions corresponding to amino acids selected from: (a) phenylalanine 305 of the F. novicida decarboxylase (SEQ ID NO: 198); (b) threonine 397 of the F. novicida decarboxylase (SEQ ID NO: 198); (c) serine 401 of the F. novicida decarboxylase (SEQ ID NO: 198); (d) isoleucine 481 of the F. novicida decarboxylase (SEQ ID NO: 198); (e) leucine 485 of the F. novicida decarboxylase (SEQ ID NO: 198); (f) phenylalanine 556 of the F. novicida decarboxylase (SEQ ID NO: 198); and (g) leucine 560 of the F. novicida decarboxylase (SEQ ID NO: 198). In yet another exemplary embodiment, at least one of the exogenously encoded enzymes is a decarboxylase enzyme having one or more modifications or mutations at positions corresponding to amino acids selected from: (a) phenylalanine 292 of the S. cerevisiae PDC1 (SEQ ID NO: 241); (b) threonine 388 of the S. cerevisiae PDC1 (SEQ ID NO: 241); (c) alanine 392 of the S. cerevisiae PDC1 (SEQ ID NO: 241); (d) serine 408 of the S. cerevisiae PDC1 (SEQ ID NO: 241); (e) valine 410 of the S. cerevisiae PDC1 (SEQ ID NO: 241); (f) isoleucine 476 of the S. cerevisiae PDC1 (SEQ ID NO: 241); (g) glutamine 552 of the S. cerevisiae PDC1 (SEQ ID NO: 241); and (h) threonine 556 of the S. cerevisiae PDC1 (SEQ ID NO: 241).

[0053] In one embodiment, one or more of the isobutanol pathway genes encodes an enzyme that is localized to the cytosol. In one embodiment, the recombinant microorganisms comprise an isobutanol producing metabolic pathway with at least one isobutanol pathway enzyme localized in the cytosol. In another embodiment, the recombinant microorganisms comprise an isobutanol producing metabolic pathway with at least two isobutanol pathway enzymes localized in the cytosol. In yet another embodiment, the recombinant microorganisms comprise an isobutanol producing metabolic pathway with at least three isobutanol pathway enzymes localized in the cytosol. In yet another embodiment, the recombinant microorganisms comprise an isobutanol producing metabolic pathway with at least four isobutanol pathway enzymes localized in the cytosol. In an exemplary embodiment, the recombinant microorganisms comprise an isobutanol producing metabolic pathway with five isobutanol pathway enzymes localized in the cytosol. In yet another exemplary embodiment, the recombinant microorganisms comprise an isobutanol producing metabolic pathway with all isobutanol pathway enzymes localized in the cytosol.

[0054] In various embodiments described herein, the isobutanol pathway genes may encode enzyme(s) selected from the group consisting of acetolactate synthase (ALS), ketol-acid reductoisomerase (KARI), dihydroxyacid dehydratase (DHAD), 2-keto-acid decarboxylase, e.g., keto-isovalerate decarboxylase (KIVD), and alcohol dehydrogenase (ADH). In one embodiment, the KARI is an NADH-dependent KARI (NKR). In another embodiment, the ADH is an NADH-dependent ADH. In yet another embodiment, the KARI is an NADH-dependent KARI (NKR) and the ADH is an NADH-dependent ADH. In an exemplary embodiment, the 2-keto-acid decarboxylase is a polypeptide with keto-isovalerate decarboxylase (KIVD) activity, wherein said polypeptide is at least about 65% identical to a polypeptide selected from SEQ ID NOs 1-214. In another exemplary embodiment, the 2-keto-acid decarboxylase a decarboxylase enzyme having one or more modifications or mutations at positions corresponding to amino acids selected from: (a) aspartic acid 26 of the L. lactis KIVD (SEQ ID NO: 197); (b) histidine 112 of the L. lactis KIVD (SEQ ID NO: 197); (c) histidine 113 of the L. lactis KIVD (SEQ ID NO: 197); (d) glycine 402 of the L. lactis KIVD (SEQ ID NO: 197); and (e) glutamic acid 462 of the L. lactis KIVD (SEQ ID NO: 197). In yet another exemplary embodiment, the 2-keto-acid decarboxylase is a decarboxylase enzyme having one or more modifications or mutations at positions corresponding to amino acids selected from: (a) serine 286 of the L. lactis KIVD (SEQ ID NO: 197); (b) glutamine 377 of the L. lactis KIVD (SEQ ID NO: 197); (c) phenylalanine 381 of the L. lactis KIVD (SEQ ID NO: 197); (d) valine 461 of the L. lactis KIVD (SEQ ID NO: 197); (e) isoleucine 465 of the L. lactis KIVD (SEQ ID NO: 197); (f) methionine 538 of the L. lactis KIVD (SEQ ID NO: 197); and (g) phenylalanine 542 of the L. lactis KIVD (SEQ ID NO: 197). In yet another exemplary embodiment, the 2-keto-acid decarboxylase is a decarboxylase enzyme having one or more modifications or mutations at positions corresponding to amino acids selected from: (a) phenylalanine 305 of the F. novicida decarboxylase (SEQ ID NO: 198); (b) threonine 397 of the F. novicida decarboxylase (SEQ ID NO: 198); (c) serine 401 of the F. novicida decarboxylase (SEQ ID NO: 198); (d) isoleucine 481 of the F. novicida decarboxylase (SEQ ID NO: 198); (e) leucine 485 of the F. novicida decarboxylase (SEQ ID NO: 198); (f) phenylalanine 556 of the F. novicida decarboxylase (SEQ ID NO: 198); and (g) leucine 560 of the F. novicida decarboxylase (SEQ ID NO: 198). In yet another exemplary embodiment, the 2-keto-acid decarboxylase is a decarboxylase enzyme having one or more modifications or mutations at positions corresponding to amino acids selected from: (a) phenylalanine 292 of the S. cerevisiae PDC1 (SEQ ID NO: 241); (b) threonine 388 of the S. cerevisiae PDC1 (SEQ ID NO: 241); (c) alanine 392 of the S. cerevisiae PDC1 (SEQ ID NO: 241); (d) serine 408 of the S. cerevisiae PDC1 (SEQ ID NO: 241); (e) valine 410 of the S. cerevisiae PDC1 (SEQ ID NO: 241); (f) isoleucine 476 of the S. cerevisiae PDC1 (SEQ ID NO: 241); (g) glutamine 552 of the S. cerevisiae PDC1 (SEQ ID NO: 241); and (h) threonine 556 of the S. cerevisiae PDC1 (SEQ ID NO: 241).

[0055] In various embodiments described herein, the recombinant microorganisms of the invention that comprise an isobutanol producing metabolic pathway may be further engineered to reduce or eliminate the expression or activity of one or more enzymes selected from a pyruvate decarboxylase (PDC), a glycerol-3-phosphate dehydrogenase (GPD), a 3-keto acid reductase (3-KAR), or an aldehyde dehydrogenase (ALDH).

[0056] In one embodiment, the recombinant microorganisms may be recombinant prokaryotic microorganisms. In another embodiment, the recombinant microorganisms may be recombinant eukaryotic microorganisms. In a further embodiment, the recombinant eukaryotic microorganisms may be recombinant yeast microorganisms.

[0057] In some embodiments, the recombinant yeast microorganisms may be members of the Saccharomyces clade, Saccharomyces sensu stricto microorganisms, Crabtree-negative yeast microorganisms, Crabtree-positive yeast microorganisms, post-WGD (whole genome duplication) yeast microorganisms, pre-WGD (whole genome duplication) yeast microorganisms, and non-fermenting yeast microorganisms.

[0058] In some embodiments, the recombinant microorganisms may be yeast recombinant microorganisms of the Saccharomyces clade.

[0059] In some embodiments, the recombinant microorganisms may be Saccharomyces sensu stricto microorganisms. In one embodiment, the Saccharomyces sensu stricto is selected from the group consisting of S. cerevisiae, S. kudriavzevii, S. mikatae, S. bayanus, S. uvarum, S. carocanis and hybrids thereof.

[0060] In some embodiments, the recombinant microorganisms may be Crabtree-negative recombinant yeast microorganisms. In one embodiment, the Crabtree-negative yeast microorganism is classified into a genera selected from the group consisting of Saccharomyces, Kluyveromyces, Pichia, Issatchenkia, Hansenula, or Candida. In additional embodiments, the Crabtree-negative yeast microorganism is selected from Saccharomyces kluyveri, Kluyveromyces lactis, Kluyveromyces marxianus, Pichia anomala, Pichia stipitis, Hansenula anomala, Candida utilis and Kluyveromyces waltii.

[0061] In some embodiments, the recombinant microorganisms may be Crabtree-positive recombinant yeast microorganisms. In one embodiment, the Crabtree-positive yeast microorganism is classified into a genera selected from the group consisting of Saccharomyces, Kluyveromyces, Zygosaccharomyces, Debaryomyces, Candida, Pichia and Schizosaccharomyces. In additional embodiments, the Crabtree-positive yeast microorganism is selected from the group consisting of Saccharomyces cerevisiae, Saccharomyces uvarum, Saccharomyces bayanus, Saccharomyces paradoxus, Saccharomyces castelli, Kluyveromyces thermotolerans, Candida glabrata, Z. bailli, Z. rouxii, Debaryomyces hansenii, Pichia pastorius, Schizosaccharomyces pombe, and Saccharomyces uvarum.

[0062] In some embodiments, the recombinant microorganisms may be post-WGD (whole genome duplication) yeast recombinant microorganisms. In one embodiment, the post-WGD yeast recombinant microorganism is classified into a genera selected from the group consisting of Saccharomyces or Candida. In additional embodiments, the post-WGD yeast is selected from the group consisting of Saccharomyces cerevisiae, Saccharomyces uvarum, Saccharomyces bayanus, Saccharomyces paradoxus, Saccharomyces castelli, and Candida glabrata.

[0063] In some embodiments, the recombinant microorganisms may be pre-WGD (whole genome duplication) yeast recombinant microorganisms. In one embodiment, the pre-WGD yeast recombinant microorganism is classified into a genera selected from the group consisting of Saccharomyces, Kluyveromyces, Candida, Pichia, Issatchenkia, Debaryomyces, Hansenula, Pachysolen, Yarrowia and Schizosaccharomyces. In additional embodiments, the pre-WGD yeast is selected from the group consisting of Saccharomyces kluyveri, Kluyveromyces thermotolerans, Kluyveromyces marxianus, Kluyveromyces waltii, Kluyveromyces lactis, Candida tropicalis, Pichia pastoris, Pichia anomala, Pichia stipitis, Issatchenkia orientalis, Issatchenkia occidentalis, Debaryomyces hansenii, Hansenula anomala, Pachysolen tannophilis, Yarrowia lipolytica, and Schizosaccharomyces pombe.

[0064] In some embodiments, the recombinant microorganisms may be microorganisms that are non-fermenting yeast microorganisms, including, but not limited to those, classified into a genera selected from the group consisting of Tricosporon, Rhodotorula, Myxozyma, or Candida. In a specific embodiment, the non-fermenting yeast is C. xestobii.

[0065] In another aspect, the present invention provides methods of producing isobutanol using a recombinant microorganism as described herein. In one embodiment, the method includes cultivating the recombinant microorganism in a culture medium containing a feedstock providing the carbon source until a recoverable quantity of isobutanol is produced and optionally, recovering the isobutanol. In one embodiment, the microorganism produces isobutanol from a carbon source at a yield of at least about 5 percent theoretical. In another embodiment, the microorganism produces isobutanol at a yield of at least about 10 percent, at least about 15 percent, about least about 20 percent, at least about 25 percent, at least about 30 percent, at least about 35 percent, at least about 40 percent, at least about 45 percent, at least about 50 percent, at least about 55 percent, at least about 60 percent, at least about 65 percent, at least about 70 percent, at least about 75 percent, at least about 80 percent, at least about 85 percent, at least about 90 percent, at least about 95 percent, or at least about 97.5 percent theoretical.

[0066] In one embodiment, the recombinant microorganism converts the carbon source to isobutanol under aerobic conditions. In another embodiment, the recombinant microorganism converts the carbon source to isobutanol under microaerobic conditions. In yet another embodiment, the recombinant microorganism converts the carbon source to isobutanol under anaerobic conditions.

### BRIEF DESCRIPTION OF DRAWINGS

[0067] Illustrative embodiments of the invention are illustrated in the drawings, in which:

[0068] FIG. 1 illustrates an exemplary embodiment of an isobutanol pathway.

[0069] FIG. 2 illustrates an exemplary embodiment of an NADH-dependent isobutanol pathway.

[0070] FIG. 3 illustrates a phylogenetic tree of characterized proteins from Table 2. Boxes distinctly outline IPDC proteins, PDC proteins, and KIVD proteins. “In-group” defines an evolutionary clade and “out-group” defines an evolutionary grade used in subsequent analysis.

[0071] FIG. 4 illustrates the phylogenetic tree of the KIVD clade. Each tree node/leaf represents a distinct “hit group.” The SEQ designations in this figure do not correspond to the specific SEQ ID NO: designations provided herein.

[0072] FIG. 5 illustrates the active site of KdcA from L. lactis. This active site includes catalytic residues (green, i.e., D26, E49, H112, H113, and E462), the thiamin diphosphate cofactor (dark blue, i.e., TPP), and residues shaping substrate specificity (orange, i.e., S286, Q377, F381, V461, I465, M538, F542). Also included is pyruvate (cyan, i.e., immediately above the I465 residue) as found in the S. cerevisiae PDC model 2vk1. The residues closest to the variable portion of the substrate (i.e., the pyruvate methyl portion of the aliphatic portion of keto-isovalerate) are V461, Q377, I465, and F542. Despite the greater distance of the other residues, S286, F381, and M538, these also appear to impact specificity. For example, aromatic residues at these positions appear to contribute to the relatively strict preference for pyruvate of Zm_PDC.

[0073] FIG. 6 illustrates an overlay of the S. cerevisiae PDC with KdcA. Pyruvate is bound very near to the thiamin diphosphate. Catalytic side chains are shown in white. Residues at specificity locations are illustrated in green (Sc_PDC, i.e., F292, T388, and I476) or orange (KdcA, i.e., S292, Q388, and V476). Several mutations are very close to the substrate and play a role in allowing bulky beta-branched substrates: I476V, T388Q, and F292S. The other mutations are farther from the substrate. The farther mutations play a role in determining activity toward larger substrates (e.g., indolepyruvate). The farther sites also differ between different PDCs. Unlike Sc_PDC, Zm_PDC has large aromatic residues at these locations and has a reduced substrate spectrum with respect to Sc_PDC.

[0074] FIG. 7 illustrates the crystal structure of the Sc_PDC variant D28A in complex with the substrate pyruvate (blue). The thiamine diphosphate (yellow) and catalytic residues (green) are poised for catalysis. The spacefilling model demonstrates a tight fit around pyruvate.

[0075] FIG. 8 illustrates a sorted listing of polypeptides (SEQ ID NOS.: 271-778) likely to exhibit specific keto-isovalerate decarboxylase (KivD) activity.

[0076] FIG. 9 illustrates an alignment of the specificity amino acids from the L. lactis KivD (SEQ ID NOS.: 271-292). The specificity amino acids refer to the identity of the residue corresponding to S286, Q377, F381, V461, I465, M538, and F542 from the L. lactis KivD.

[0077] FIG. 10 illustrates the specific activity on KIV for a cross-section of decarboxylases as determined by in vitro testing.

[0078] FIG. 11 illustrates the specific activity on pyruvate for a cross-section of decarboxylases as determined by in vitro testing.

[0079] FIG. 12 illustrates the ratio of specific activity for KIV/pyruvate for a cross-section of decarboxylases as determined by in vitro testing.

[0080] FIG. 13 illustrates how partial model for the Francisella cf. novicida 3523 decarboxylase, created by modeling mutations (white sticks) onto the structure of LI_KdcA (2vbf). To approximate the KIV position, a KIV molecule was modeled using SHARPEN/OpenBabel to create the coordinates and PyMOL to adjust the torsions. The substrate was placed in accord with the observed ligand positions in 2vk1 and 2vbg.

[0081] FIG. 14 illustrates the python script used to calculate sequence entropy within decarboxylases described herein.

[0082] FIGS. 15-17 illustrate python scripts used to generate models for wild-type S. cerevisiae PDC1 given crystal structures for point mutations thereof.

[0083] FIG. 18 illustrates a python script used to model point mutations within the S. cerevisiae PDC1. The script illustrates the A392F mutation analysis, which is representative of the analysis conducted for other disclosed point mutations. The models allowed for mutated sidechains to select new conformations from an expanded Dunbrack rotamer library.

[0084] FIG. 19 illustrates a python script for protein design calculation of the S. cerevisiae PDC1. This protein design calculation identified the sequence and rotamer sidechain positions which minimize the energy according to the all-atom Rosetta energy model.

[0085] FIG. 20 illustrates a script specifying the protein design palette for the S. cerevisiae PDC1.

### DETAILED DESCRIPTION

[0086] As used herein and in the appended claims, the singular forms “a,” “an,” and “the” include plural referents unless the context clearly dictates otherwise. Thus, for example, reference to “a polynucleotide” includes a plurality of such polynucleotides and reference to “the microorganism” includes reference to one or more microorganisms, and so forth.

[0087] Unless defined otherwise, all technical and scientific terms used herein have the same meaning as commonly understood to one of ordinary skill in the art to which this disclosure belongs. Although methods and materials similar or equivalent to those described herein can be used in the practice of the disclosed methods and compositions, the exemplary methods, devices and materials are described herein.

[0088] Any publications discussed above and throughout the text are provided solely for their disclosure prior to the filing date of the present application. Nothing herein is to be construed as an admission that the inventors are not entitled to antedate such disclosure by virtue of prior disclosure.

[0089] The term “microorganism” includes prokaryotic and eukaryotic microbial species from the Domains Archaea, Bacteria and Eucarya, the latter including yeast and filamentous fungi, protozoa, algae, or higher Protista. The terms “microbial cells” and “microbes” are used interchangeably with the term microorganism.

[0090] The term “prokaryotes” is art recognized and refers to cells which contain no nucleus or other cell organelles. The prokaryotes are generally classified in one of two domains, the Bacteria and the Archaea. The definitive difference between organisms of the Archaea and Bacteria domains is based on fundamental differences in the nucleotide base sequence in the 16S ribosomal RNA.

[0091] The term “Archaea” refers to a categorization of organisms of the division Mendosicutes, typically found in unusual environments and distinguished from the rest of the prokaryotes by several criteria, including the number of ribosomal proteins and the lack of muramic acid in cell walls. On the basis of ssrRNA analysis, the Archaea consist of two phylogenetically-distinct groups: Crenarchaeota and Euryarchaeota. On the basis of their physiology, the Archaea can be organized into three types: methanogens (prokaryotes that produce methane); extreme halophiles (prokaryotes that live at very high concentrations of salt (NaCl); and extreme (hyper) thermophiles (prokaryotes that live at very high temperatures). Besides the unifying archaeal features that distinguish them from Bacteria (i.e., no murein in cell wall, ester-linked membrane lipids, etc.), these prokaryotes exhibit unique structural or biochemical attributes which adapt them to their particular habitats. The Crenarchaeota consist mainly of hyperthermophilic sulfur-dependent prokaryotes and the Euryarchaeota contain the methanogens and extreme halophiles.

[0092] “Bacteria”, or “eubacteria”, refers to a domain of prokaryotic organisms. Bacteria include at least eleven distinct groups as follows: (1) Gram-positive (gram+) bacteria, of which there are two major subdivisions: (1) high G+C group (Actinomycetes, Mycobacteria, Micrococcus, others) (2) low G+C group (Bacillus, Clostridia, Lactobacillus, Staphylococci, Streptococci, Mycoplasmas); (2) Proteobacteria, e.g., Purple photosynthetic+non-photosynthetic Gram-negative bacteria (includes most “common” Gram-negative bacteria); (3) Cyanobacteria, e.g., oxygenic phototrophs; (4) Spirochetes and related species; (5) Planctomyces; (6) Bacteroides, Flavobacteria; (7) Chlamydia; (8) Green sulfur bacteria; (9) Green non-sulfur bacteria (also anaerobic phototrophs); (10) Radioresistant micrococci and relatives; (11) Thermotoga and Thermosipho thermophiles.

[0093] “Gram-negative bacteria” include cocci, nonenteric rods, and enteric rods. The genera of Gram-negative bacteria include, for example, Neisseria, Spirillum, Pasteurella, Brucella, Yersinia, Francisella, Haemophilus, Bordetella, Escherichia, Salmonella, Shigella, Klebsiella, Proteus, Vibrio, Pseudomonas, Bacteroides, Acetobacter, Aerobacter, Agrobacterium, Azotobacter, Spirilla, Serratia, Vibrio, Rhizobium, Chlamydia, Rickettsia, Treponema, and Fusobacterium.

[0094] “Gram positive bacteria” include cocci, nonsporulating rods, and sporulating rods. The genera of gram positive bacteria include, for example, Actinomyces, Bacillus, Clostridium, Corynebacterium, Erysipelothrix, Lactobacillus, Listeria, Mycobacterium, Myxococcus, Nocardia, Staphylococcus, Streptococcus, and Streptomyces.

[0095] The term “genus” is defined as a taxonomic group of related species according to the Taxonomic Outline of Bacteria and Archaea (Garrity, G. M., Lilburn, T. G., Cole, J. R., Harrison, S. H., Euzeby, J., and Tindall, B. J. (2007) The Taxonomic Outline of Bacteria and Archaea. TOBA Release 7.7, March 2007. Michigan State University Board of Trustees. [http://www.taxonomicoutline.org/]).

[0096] The term “species” is defined as a collection of closely related organisms with greater than 97% 16S ribosomal RNA sequence homology and greater than 70% genomic hybridization and sufficiently different from all other organisms so as to be recognized as a distinct unit.

[0097] The terms “recombinant microorganism,” “modified microorganism,” and “recombinant host cell” are used interchangeably herein and refer to microorganisms that have been genetically modified to express or to overexpress endogenous polynucleotides, to express heterologous polynucleotides, such as those included in a vector, in an integration construct, or which have an alteration in expression of an endogenous gene. By “alteration” it is meant that the expression of the gene, or level of a RNA molecule or equivalent RNA molecules encoding one or more polypeptides or polypeptide subunits, or activity of one or more polypeptides or polypeptide subunits is up regulated or down regulated, such that expression, level, or activity is greater than or less than that observed in the absence of the alteration. For example, the term “alter” can mean “inhibit,” but the use of the word “alter” is not limited to this definition. It is understood that the terms “recombinant microorganism” and “recombinant host cell” refer not only to the particular recombinant microorganism but to the progeny or potential progeny of such a microorganism. Because certain modifications may occur in succeeding generations due to either mutation or environmental influences, such progeny may not, in fact, be identical to the parent cell, but are still included within the scope of the term as used herein.

[0098] The term “expression” with respect to a gene sequence refers to transcription of the gene and, as appropriate, translation of the resulting mRNA transcript to a protein. Thus, as will be clear from the context, expression of a protein results from transcription and translation of the open reading frame sequence. The level of expression of a desired product in a host cell may be determined on the basis of either the amount of corresponding mRNA that is present in the cell, or the amount of the desired product encoded by the selected sequence. For example, mRNA transcribed from a selected sequence can be quantitated by qRT-PCR or by Northern hybridization (see Sambrook et al., Molecular Cloning: A Laboratory Manual, Cold Spring Harbor Laboratory Press (1989)). Protein encoded by a selected sequence can be quantitated by various methods, e.g., by ELISA, by assaying for the biological activity of the protein, or by employing assays that are independent of such activity, such as western blotting or radioimmunoassay, using antibodies that recognize and bind the protein. See Sambrook et al., 1989, supra.

[0099] The term “overexpression” refers to an elevated level (e.g., aberrant level) of mRNAs encoding for a protein(s), and/or to elevated levels of protein(s) in cells as compared to similar corresponding unmodified cells expressing basal levels of mRNAs or having basal levels of proteins. In particular embodiments, mRNA(s) or protein(s) may be overexpressed by at least 2-fold, 3-fold, 4-fold, 5-fold, 6-fold, 8-fold, 10-fold, 12-fold, 15-fold or more in microorganisms engineered to exhibit increased gene mRNA, protein, and/or activity.

[0100] As used herein and as would be understood by one of ordinary skill in the art, “reduced activity and/or expression” of a protein such as an enzyme can mean either a reduced specific catalytic activity of the protein (e.g. reduced activity) and/or decreased concentrations of the protein in the cell (e.g. reduced expression). As would be understood by one or ordinary skill in the art, the reduced activity of a protein in a cell may result from decreased concentrations of the protein in the cell.

[0101] The term “wild-type microorganism” describes a cell that occurs in nature, i.e. a cell that has not been genetically modified. A wild-type microorganism can be genetically modified to express or overexpress a first target enzyme. This microorganism can act as a parental microorganism in the generation of a microorganism modified to express or overexpress a second target enzyme. In turn, the microorganism modified to express or overexpress a first and a second target enzyme can be modified to express or overexpress a third target enzyme.

[0102] Accordingly, a “parental microorganism” functions as a reference cell for successive genetic modification events. Each modification event can be accomplished by introducing a nucleic acid molecule in to the reference cell. The introduction facilitates the expression or overexpression of a target enzyme. It is understood that the term “facilitates” encompasses the activation of endogenous polynucleotides encoding a target enzyme through genetic modification of e.g., a promoter sequence in a parental microorganism. It is further understood that the term “facilitates” encompasses the introduction of heterologous polynucleotides encoding a target enzyme in to a parental microorganism.

[0103] The term “engineer” refers to any manipulation of a microorganism that results in a detectable change in the microorganism, wherein the manipulation includes but is not limited to inserting a polynucleotide and/or polypeptide heterologous to the microorganism and mutating a polynucleotide and/or polypeptide native to the microorganism.

[0104] The term “mutation” as used herein indicates any modification of a nucleic acid and/or polypeptide which results in an altered nucleic acid or polypeptide. Mutations include, for example, point mutations, deletions, or insertions of single or multiple residues in a polynucleotide, which includes alterations arising within a protein-encoding region of a gene as well as alterations in regions outside of a protein-encoding sequence, such as, but not limited to, regulatory or promoter sequences. A genetic alteration may be a mutation of any type. For instance, the mutation may constitute a point mutation, a frame-shift mutation, a nonsense mutation, an insertion, or a deletion of part or all of a gene. In addition, in some embodiments of the modified microorganism, a portion of the microorganism genome has been replaced with a heterologous polynucleotide. In some embodiments, the mutations are naturally-occurring. In other embodiments, the mutations are identified and/or enriched through artificial selection pressure. In still other embodiments, the mutations in the microorganism genome are the result of genetic engineering.

[0105] The term “biosynthetic pathway”, also referred to as “metabolic pathway”, refers to a set of anabolic or catabolic biochemical reactions for converting one chemical species into another. Gene products belong to the same “metabolic pathway” if they, in parallel or in series, act on the same substrate, produce the same product, or act on or produce a metabolic intermediate (i.e., metabolite) between the same substrate and metabolite end product.

[0106] As used herein, the term “isobutanol producing metabolic pathway” refers to an enzyme pathway which produces isobutanol from pyruvate.

[0107] The term “NADH-dependent” as used herein with reference to an enzyme, e.g., KARI and/or ADH, refers to an enzyme that catalyzes the reduction of a substrate coupled to the oxidation of NADH with a catalytic efficiency that is greater than the reduction of the same substrate coupled to the oxidation of NADPH at equal substrate and cofactor concentrations.

[0108] The term “exogenous” as used herein with reference to various molecules, e.g., polynucleotides, polypeptides, enzymes, etc., refers to molecules that are not normally or naturally found in and/or produced by a given yeast, bacterium, organism, microorganism, or cell in nature.

[0109] On the other hand, the term “endogenous” or “native” as used herein with reference to various molecules, e.g., polynucleotides, polypeptides, enzymes, etc., refers to molecules that are normally or naturally found in and/or produced by a given yeast, bacterium, organism, microorganism, or cell in nature.

[0110] The term “heterologous” as used herein in the context of a modified host cell refers to various molecules, e.g., polynucleotides, polypeptides, enzymes, etc., wherein at least one of the following is true: (a) the molecule(s) is/are foreign (“exogenous”) to (i.e., not naturally found in) the host cell; (b) the molecule(s) is/are naturally found in (e.g., is “endogenous to”) a given host microorganism or host cell but is either produced in an unnatural location or in an unnatural amount in the cell; and/or (c) the molecule(s) differ(s) in nucleotide or amino acid sequence from the endogenous nucleotide or amino acid sequence(s) such that the molecule differing in nucleotide or amino acid sequence from the endogenous nucleotide or amino acid as found endogenously is produced in an unnatural (e.g., greater than naturally found) amount in the cell.

[0111] The term “feedstock” is defined as a raw material or mixture of raw materials supplied to a microorganism or fermentation process from which other products can be made. For example, a carbon source, such as biomass or the carbon compounds derived from biomass are a feedstock for a microorganism that produces a biofuel in a fermentation process. However, a feedstock may contain nutrients other than a carbon source.

[0112] The term “substrate” or “suitable substrate” refers to any substance or compound that is converted or meant to be converted into another compound by the action of an enzyme. The term includes not only a single compound, but also combinations of compounds, such as solutions, mixtures and other materials which contain at least one substrate, or derivatives thereof. Further, the term “substrate” encompasses not only compounds that provide a carbon source suitable for use as a starting material, such as any biomass derived sugar, but also intermediate and end product metabolites used in a pathway associated with a recombinant microorganism as described herein.

[0113] The term “fermentation” or “fermentation process” is defined as a process in which a microorganism is cultivated in a culture medium containing raw materials, such as feedstock and nutrients, wherein the microorganism converts raw materials, such as a feedstock, into products.

[0114] The term “volumetric productivity” or “production rate” is defined as the amount of product formed per volume of medium per unit of time. Volumetric productivity is reported in gram per liter per hour (g/L/h).

[0115] The term “specific productivity” or “specific production rate” is defined as the amount of product formed per volume of medium per unit of time per amount of cells. Specific productivity is reported in gram or milligram per liter per hour per OD (g/L/h/OD).

[0116] The term “yield” is defined as the amount of product obtained per unit weight of raw material and may be expressed as g product per g substrate (g/g). Yield may be expressed as a percentage of the theoretical yield. “Theoretical yield” is defined as the maximum amount of product that can be generated per a given amount of substrate as dictated by the stoichiometry of the metabolic pathway used to make the product. For example, the theoretical yield for one typical conversion of glucose to isobutanol is 0.41 g/g. As such, a yield of isobutanol from glucose of 0.39 g/g would be expressed as 95% of theoretical or 95% theoretical yield.

[0117] The term “titer” is defined as the strength of a solution or the concentration of a substance in solution. For example, the titer of a biofuel in a fermentation broth is described as g of biofuel in solution per liter of fermentation broth (g/L).

[0118] “Aerobic conditions” are defined as conditions under which the oxygen concentration in the fermentation medium is sufficiently high for an aerobic or facultative anaerobic microorganism to use as a terminal electron acceptor.

[0119] In contrast, “anaerobic conditions” are defined as conditions under which the oxygen concentration in the fermentation medium is too low for the microorganism to use as a terminal electron acceptor. Anaerobic conditions may be achieved by sparging a fermentation medium with an inert gas such as nitrogen until oxygen is no longer available to the microorganism as a terminal electron acceptor. Alternatively, anaerobic conditions may be achieved by the microorganism consuming the available oxygen of the fermentation until oxygen is unavailable to the microorganism as a terminal electron acceptor. Methods for the production of isobutanol under anaerobic conditions are described in commonly owned and co-pending publication, US 2010/0143997, the disclosures of which are herein incorporated by reference in its entirety for all purposes.

[0120] “Aerobic metabolism” refers to a biochemical process in which oxygen is used as a terminal electron acceptor to make energy, typically in the form of ATP, from carbohydrates. Aerobic metabolism occurs e.g. via glycolysis and the TCA cycle, wherein a single glucose molecule is metabolized completely into carbon dioxide in the presence of oxygen.

[0121] In contrast, “anaerobic metabolism” refers to a biochemical process in which oxygen is not the final acceptor of electrons contained in NADH. Anaerobic metabolism can be divided into anaerobic respiration, in which compounds other than oxygen serve as the terminal electron acceptor, and substrate level phosphorylation, in which the electrons from NADH are utilized to generate a reduced product via a “fermentative pathway.”

[0122] In “fermentative pathways”, NAD(P)H donates its electrons to a molecule produced by the same metabolic pathway that produced the electrons carried in NAD(P)H. For example, in one of the fermentative pathways of certain yeast strains, NAD(P)H generated through glycolysis transfers its electrons to pyruvate, yielding ethanol. Fermentative pathways are usually active under anaerobic conditions but may also occur under aerobic conditions, under conditions where NADH is not fully oxidized via the respiratory chain. For example, above certain glucose concentrations, Crabtree positive yeasts produce large amounts of ethanol under aerobic conditions.

[0123] The term “byproduct” or “by-product” means an undesired product related to the production of an amino acid, amino acid precursor, chemical, chemical precursor, biofuel, or biofuel precursor.

[0124] The term “substantially free” when used in reference to the presence or absence of a protein activity (3-KAR enzymatic activity, ALDH enzymatic activity, PDC enzymatic activity, GPD enzymatic activity, etc.) means the level of the protein is substantially less than that of the same protein in the wild-type host, wherein less than about 50% of the wild-type level is preferred and less than about 30% is more preferred. The activity may be less than about 20%, less than about 10%, less than about 5%, or less than about 1% of wild-type activity. Microorganisms which are “substantially free” of a particular protein activity (3-KAR enzymatic activity, ALDH enzymatic activity, PDC enzymatic activity, GPD enzymatic activity, etc.) may be created through recombinant means or identified in nature.

[0125] The term “non-fermenting yeast” is a yeast species that fails to demonstrate an anaerobic metabolism in which the electrons from NADH are utilized to generate a reduced product via a fermentative pathway such as the production of ethanol and CO₂ from glucose. Non-fermentative yeast can be identified by the “Durham Tube Test” (J. A. Barnett, R. W. Payne, and D. Yarrow. 2000. Yeasts Characteristics and Identification. 3^{rd} edition. p. 28-29. Cambridge University Press, Cambridge, UK) or by monitoring the production of fermentation productions such as ethanol and CO₂.

[0126] The term “polynucleotide” is used herein interchangeably with the term “nucleic acid” and refers to an organic polymer composed of two or more monomers including nucleotides, nucleosides or analogs thereof, including but not limited to single stranded or double stranded, sense or antisense deoxyribonucleic acid (DNA) of any length and, where appropriate, single stranded or double stranded, sense or antisense ribonucleic acid (RNA) of any length, including siRNA. The term “nucleotide” refers to any of several compounds that consist of a ribose or deoxyribose sugar joined to a purine or a pyrimidine base and to a phosphate group, and that are the basic structural units of nucleic acids. The term “nucleoside” refers to a compound (as guanosine or adenosine) that consists of a purine or pyrimidine base combined with deoxyribose or ribose and is found especially in nucleic acids. The term “nucleotide analog” or “nucleoside analog” refers, respectively, to a nucleotide or nucleoside in which one or more individual atoms have been replaced with a different atom or with a different functional group. Accordingly, the term polynucleotide includes nucleic acids of any length, DNA, RNA, analogs and fragments thereof. A polynucleotide of three or more nucleotides is also called nucleotidic oligomer or oligonucleotide.

[0127] It is understood that the polynucleotides described herein include “genes” and that the nucleic acid molecules described herein include “vectors” or “plasmids.” Accordingly, the term “gene”, also called a “structural gene” refers to a polynucleotide that codes for a particular sequence of amino acids, which comprise all or part of one or more proteins or enzymes, and may include regulatory (non-transcribed) DNA sequences, such as promoter sequences, which determine for example the conditions under which the gene is expressed. The transcribed region of the gene may include untranslated regions, including introns, 5′-untranslated region (UTR), and 3′-UTR, as well as the coding sequence.

[0128] The term “operon” refers to two or more genes which are transcribed as a single transcriptional unit from a common promoter. In some embodiments, the genes comprising the operon are contiguous genes. It is understood that transcription of an entire operon can be modified (i.e., increased, decreased, or eliminated) by modifying the common promoter. Alternatively, any gene or combination of genes in an operon can be modified to alter the function or activity of the encoded polypeptide. The modification can result in an increase in the activity of the encoded polypeptide. Further, the modification can impart new activities on the encoded polypeptide. Exemplary new activities include the use of alternative substrates and/or the ability to function in alternative environmental conditions.

[0129] A “vector” is any means by which a nucleic acid can be propagated and/or transferred between organisms, cells, or cellular components. Vectors include viruses, bacteriophage, pro-viruses, plasmids, phagemids, transposons, and artificial chromosomes such as YACs (yeast artificial chromosomes), BACs (bacterial artificial chromosomes), and PLACs (plant artificial chromosomes), and the like, that are “episomes,” that is, that replicate autonomously or can integrate into a chromosome of a host cell. A vector can also be a naked RNA polynucleotide, a naked DNA polynucleotide, a polynucleotide composed of both DNA and RNA within the same strand, a poly-lysine-conjugated DNA or RNA, a peptide-conjugated DNA or RNA, a liposome-conjugated DNA, or the like, that are not episomal in nature, or it can be an organism which comprises one or more of the above polynucleotide constructs such as an agrobacterium or a bacterium.

[0130] “Transformation” refers to the process by which a vector is introduced into a host cell. Transformation (or transduction, or transfection), can be achieved by any one of a number of means including chemical transformation (e.g. lithium acetate transformation), electroporation, microinjection, biolistics (or particle bombardment-mediated delivery), or agrobacterium mediated transformation.

[0131] The term “enzyme” as used herein refers to any substance that catalyzes or promotes one or more chemical or biochemical reactions, which usually includes enzymes totally or partially composed of a polypeptide, but can include enzymes composed of a different molecule including polynucleotides.

[0132] The term “protein,” “peptide,” or “polypeptide” as used herein indicates an organic polymer composed of two or more amino acidic monomers and/or analogs thereof. As used herein, the term “amino acid” or “amino acidic monomer” refers to any natural and/or synthetic amino acids including glycine and both D or L optical isomers. The term “amino acid analog” refers to an amino acid in which one or more individual atoms have been replaced, either with a different atom, or with a different functional group. Accordingly, the term polypeptide includes amino acidic polymer of any length including full length proteins, and peptides as well as analogs and fragments thereof. A polypeptide of three or more amino acids is also called a protein oligomer or oligopeptide

[0133] The term “homolog,” used with respect to an original polynucleotide or polypeptide of a first family or species, refers to distinct polynucleotides or polypeptides of a second family or species which are determined by functional, structural or genomic analyses to be a polynucleotide or polypeptide of the second family or species which corresponds to the original polynucleotide or polypeptide of the first family or species. Most often, homologs will have functional, structural or genomic similarities. Techniques are known by which homologs of a polynucleotide or polypeptide can readily be cloned using genetic probes and PCR. Identity of cloned sequences as homolog can be confirmed using functional assays and/or by genomic mapping of the genes.

[0134] A polypeptide has “homology” or is “homologous” to a second polypeptide if the amino acid sequence encoded by a gene has a similar amino acid sequence to that of the second gene. Alternatively, a polypeptide has homology to a second polypeptide if the two polypeptides have “similar” amino acid sequences. (Thus, the terms “homologous polypeptides” or “homologous proteins” are defined to mean that the two polypeptides have similar amino acid sequences).

[0135] The term “analog” or “analogous” refers to polynucleotide or polypeptide sequences that are related to one another in function only and are not from common descent or do not share a common ancestral sequence. Analogs may differ in sequence but may share a similar structure, due to convergent evolution. For example, two enzymes are analogs or analogous if the enzymes catalyze the same reaction of conversion of a substrate to a product, are unrelated in sequence, and irrespective of whether the two enzymes are related in structure.

### Isobutanol Producing Recombinant Microorganisms

[0136] A variety of microorganisms convert sugars to produce pyruvate, which is then utilized in a number of pathways of cellular metabolism. In recent years, microorganisms, including yeast, have been engineered to produce a number of desirable products via pyruvate-driven biosynthetic pathways, including isobutanol, an important commodity chemical and biofuel candidate (See, e.g., commonly owned and co-pending patent publications, US 2009/0226991, US 2010/0143997, US 2011/0020889, US 2011/0076733, and WO 2010/075504).

[0137] As described herein, the present invention relates to recombinant microorganisms for producing isobutanol, wherein said recombinant microorganisms comprise an isobutanol producing metabolic pathway. In one embodiment, the isobutanol producing metabolic pathway to convert pyruvate to isobutanol can be comprised of the following reactions:

[0138] 1. 2 pyruvate→acetolactate+CO₂

[0139] 2. acetolactate+NAD(P)H→2,3-dihydroxyisovalerate+NAD(P)⁺

[0140] 3. 2,3-dihydroxyisovalerate→alpha-ketoisovalerate

[0141] 4. alpha-ketoisovalerate→isobutyraldehyde+CO₂

[0142] 5. isobutyraldehyde+NAD(P)H→isobutanol+NADP

[0143] In one embodiment, these reactions are carried out by the enzymes 1) Acetolactate synthase (ALS), 2) Ketol-acid reductoisomerase (KARI), 3) Dihydroxy-acid dehydratase (DHAD), 4) 2-keto-acid decarboxylase, e.g., Keto-isovalerate decarboxylase (KIVD), and 5) an Alcohol dehydrogenase (ADH) (FIG. 1). In some embodiments, the recombinant microorganism may be engineered to overexpress one or more of these enzymes. In an exemplary embodiment, the recombinant microorganism is engineered to overexpress all of these enzymes.

[0144] Alternative pathways for the production of isobutanol in yeast have been described in W0/2007/050671 and in Dickinson et al., 1998, J Biol Chem 273:25751-6. These and other isobutanol producing metabolic pathways are within the scope of the present application. In one embodiment, the isobutanol producing metabolic pathway comprises five substrate to product reactions. In another embodiment, the isobutanol producing metabolic pathway comprises six substrate to product reactions. In yet another embodiment, the isobutanol producing metabolic pathway comprises seven substrate to product reactions.

[0145] In various embodiments described herein, the recombinant microorganism comprises an isobutanol producing metabolic pathway. In one embodiment, the isobutanol producing metabolic pathway comprises at least one exogenous gene encoding a polypeptide that catalyzes a step in the conversion of pyruvate to isobutanol. In another embodiment, the isobutanol producing metabolic pathway comprises at least two exogenous genes encoding polypeptides that catalyze steps in the conversion of pyruvate to isobutanol. In yet another embodiment, the isobutanol producing metabolic pathway comprises at least three exogenous genes encoding polypeptides that catalyze steps in the conversion of pyruvate to isobutanol. In yet another embodiment, the isobutanol producing metabolic pathway comprises at least four exogenous genes encoding polypeptides that catalyze steps in the conversion of pyruvate to isobutanol. In yet another embodiment, the isobutanol producing metabolic pathway comprises at least five exogenous genes encoding polypeptides that catalyze steps in the conversion of pyruvate to isobutanol. In yet another embodiment, all of the isobutanol producing metabolic pathway steps in the conversion of pyruvate to isobutanol are converted by exogenously encoded enzymes.

[0146] In one embodiment, one or more of the isobutanol pathway genes encodes an enzyme that is localized to the cytosol. In one embodiment, the recombinant microorganisms comprise an isobutanol producing metabolic pathway with at least one isobutanol pathway enzyme localized in the cytosol. In another embodiment, the recombinant microorganisms comprise an isobutanol producing metabolic pathway with at least two isobutanol pathway enzymes localized in the cytosol. In yet another embodiment, the recombinant microorganisms comprise an isobutanol producing metabolic pathway with at least three isobutanol pathway enzymes localized in the cytosol. In yet another embodiment, the recombinant microorganisms comprise an isobutanol producing metabolic pathway with at least four isobutanol pathway enzymes localized in the cytosol. In an exemplary embodiment, the recombinant microorganisms comprise an isobutanol producing metabolic pathway with five isobutanol pathway enzymes localized in the cytosol. In yet another exemplary embodiment, the recombinant microorganisms comprise an isobutanol producing metabolic pathway with all isobutanol pathway enzymes localized in the cytosol. Isobutanol producing metabolic pathways in which one or more genes are localized to the cytosol are described in commonly owned and co-pending publication, US 2011/0076733, which is herein incorporated by reference in its entirety for all purposes.

[0147] As is understood in the art, a variety of organisms can serve as sources for the isobutanol pathway enzymes, including, but not limited to, Saccharomyces spp., including S. cerevisiae and S. uvarum, Kluyveromyces spp., including K. thermotolerans, K. lactis, and K. marxianus, Pichia spp., Hansenula spp., including H. polymorphs, Candida spp., Trichosporon spp., Yamadazyma spp., including Y. spp. stipitis, Torulaspora pretoriensis, Issatchenkia orientalis, Schizosaccharomyces spp., including S. pombe, Cryptococcus spp., Aspergillus spp., Neurospora spp., or Ustilago spp. Sources of genes from anaerobic fungi include, but not limited to, Piromyces spp., Orpinomyces spp., or Neocallimastix spp. Sources of prokaryotic enzymes that are useful include, but not limited to, Escherichia spp., Zymomonas spp., Staphylococcus spp., Bacillus spp., Clostridium spp., Corynebacterium spp., Pseudomonas spp., Lactococcus spp., Enterobacter spp., Streptococcus spp., Salmonella spp., Slackia spp., Cryptobacterium spp., and Eggerthella spp.

[0148] In some embodiments, one or more of these enzymes can be encoded by native genes. Alternatively, one or more of these enzymes can be encoded by heterologous genes.

[0149] For example, acetolactate synthases capable of converting pyruvate to acetolactate may be derived from a variety of sources (e.g., bacterial, yeast, Archaea, etc.), including B. subtilis (GenBank Accession No. Q04789.3), L. lactis (GenBank Accession No. NP_{—}267340.1), S. mutans (GenBank Accession No. NP_{—}721805.1), K. pneumoniae (GenBank Accession No. ZP_{—}06014957.1), C. glutamicum (GenBank Accession No. P42463.1), E. cloacae (GenBank Accession No. YP_{—}003613611.1), M. maripaludis (GenBank Accession No. ABX01060.1), M. grisea (GenBank Accession No. AAB81248.1), T. stipitatus (GenBank Accession No. XP_{—}002485976.1), or S. cerevisiae ILV2 (GenBank Accession No. NP_{—}013826.1). Additional acetolactate synthases capable of converting pyruvate to acetolactate are described in commonly owned and co-pending US Publication No. 2011/0076733, which is herein incorporated by reference in its entirety. A review article characterizing the biosynthesis of acetolactate from pyruvate via the activity of acetolactate synthases is provided by Chipman et al., 1998, Biochimica et Biophysica Acta 1385: 401-19, which is herein incorporated by reference in its entirety. Chipman et al. provide an alignment and consensus for the sequences of a representative number of acetolactate synthases. Motifs shared in common between the majority of acetolactate synthases include:

(SEQ ID NO: 215)
SGPG(A/C/V)(T/S)N,
(SEQ ID NO: 216)
GX(P/A)GX(V/A/T),
(SEQ ID NO: 217)
GX(Q/G)(T/A)(L/M)G(Y/F/W)(A/G)X(P/G)
(W/A)AX(G/T)(A/V),
and
(SEQ ID NO: 218)
GD(G/A)(G/S/C)F

motifs at amino acid positions corresponding to the 163-169, 240-245, 521-535, and 549-553 residues, respectively, of the S. cerevisiae ILV2. Thus, a protein harboring one or more of these amino acid motifs can generally be expected to exhibit acetolactate synthase activity.

[0150] Ketol-acid reductoisomerases capable of converting acetolactate to 2,3-dihydroxyisovalerate may be derived from a variety of sources (e.g., bacterial, yeast, Archaea, etc.), including E. coli (GenBank Accession No. EGB30597.1), L. lactis (GenBank Accession No. YP_{—}003353710.1), S. exigua (GenBank Accession No. ZP_{—}06160130.1), C. curtam (GenBank Accession No. YP_{—}003151266.1), Shewanella sp. (GenBank Accession No. YP_{—}732498.1), V. fischeri (GenBank Accession No. YP_{—}205911.1), M. maripaludis (GenBank Accession No. YP_{—}001097443.1), B. subtilis (GenBank Accession No. CAB14789), S. pombe (GenBank Accession No. NP_{—}001018845), B. thetaiotamicron (GenBank Accession No. NP 810987), or S. cerevisiae ILV5 (GenBank Accession No. NP 013459.1). Additional ketol-acid reductoisomerases capable of converting acetolactate to 2,3-dihydroxyisovalerate are described in commonly owned and co-pending US Publication No. 2011/0076733, which is herein incorporated by reference in its entirety. An alignment and consensus for the sequences of a representative number of ketol-acid reductoisomerases is provided in commonly owned and co-pending US Publication No. 2010/0143997, which is herein incorporated by reference in its entirety. Motifs shared in common between the majority of ketol-acid reductoisomerases include:

(SEQ ID NO: 219)
G(Y/C/W)GXQ(G/A),
(SEQ ID NO: 220)
(F/Y/L)(S/A)HG(F/L),
(SEQ ID NO: 221)
V(V/I/F)(M/L/A)(A/C)PK,
(SEQ ID NO: 222)
D(L/I)XGE(Q/R)XXLXG,
and
(SEQ ID NO: 223)
S(D/N/T)TA(E/Q/R)XG

motifs at amino acid positions corresponding to the 89-94, 175-179, 194-200, 262-272, and 459-465 residues, respectively, of the E. coli ketol-acid reductoisomerase encoded by ilvC. Thus, a protein harboring one or more of these amino acid motifs can generally be expected to exhibit ketol-acid reductoisomerase activity.

[0151] To date, all known, naturally existing ketol-acid reductoisomerases are known to use NADPH as a cofactor. In certain embodiments, a ketol-acid reductoisomerase which has been engineered to used NADH as a cofactor may be utilized to mediate the conversion of acetolactate to 2,3-dihydroxyisovalerate. Engineered NADH-dependent KARI enzymes (“NKRs”) and methods of generating such NKRs are disclosed in commonly owned and co-pending US Publication No. 2010/0143997.

[0152] In accordance with the invention, any number of mutations can be made to a KARI enzyme, and in a preferred aspect, multiple mutations can be made to a KARI enzyme to result in an increased ability to utilize NADH for the conversion of acetolactate to 2,3-dihydroxyisovalerate. Such mutations include point mutations, frame shift mutations, deletions, and insertions, with one or more (e.g., one, two, three, four, five or more, etc.) point mutations preferred.

[0153] Mutations may be introduced into naturally existing KARI enzymes to create NKRs using any methodology known to those skilled in the art. Mutations may be introduced randomly by, for example, conducting a PCR reaction in the presence of manganese as a divalent metal ion cofactor. Alternatively, oligonucleotide directed mutagenesis may be used to create the NKRs which allows for all possible classes of base pair changes at any determined site along the encoding DNA molecule. In general, this technique involves annealing an oligonucleotide complementary (except for one or more mismatches) to a single stranded nucleotide sequence coding for the KARI enzyme of interest. The mismatched oligonucleotide is then extended by DNA polymerase, generating a double-stranded DNA molecule which contains the desired change in sequence in one strand. The changes in sequence can, for example, result in the deletion, substitution, or insertion of an amino acid. The double-stranded polynucleotide can then be inserted into an appropriate expression vector, and a mutant or modified polypeptide can thus be produced. The above-described oligonucleotide directed mutagenesis can, for example, be carried out via PCR.

[0154] Dihydroxy acid dehydratases capable of converting 2,3-dihydroxyisovalerate to α-ketoisovalerate may be derived from a variety of sources (e.g., bacterial, yeast, Archaea, etc.), including E. coli (GenBank Accession No. YP_{—}026248.1), L. lactis (GenBank Accession No. NP_{—}267379.1), S. mutans (GenBank Accession No. NP_{—}722414.1), M. stadtmanae (GenBank Accession No. YP_{—}448586.1), M. tractuosa (GenBank Accession No. YP_{—}004053736.1), Eubacterium SCB49 (GenBank Accession No. ZP_{—}01890126.1), G. forsetti (GenBank Accession No. YP_{—}862145.1), Y. lipolytica (GenBank Accession No. XP_{—}502180.2), N. crassa (GenBank Accession No. XP_{—}963045.1), or S. cerevisiae ILV3 (GenBank Accession No. NP_{—}012550.1). Additional dihydroxy acid dehydratases capable of 2,3-dihydroxyisovalerate to α-ketoisovalerate are described in commonly owned and co-pending US Publication No. 2011/0076733. Motifs shared in common between the majority of dihydroxy acid dehydratases include:

(SEQ ID NO: 224)
SLXSRXXIA,
(SEQ ID NO: 225)
CDKXXPG,
(SEQ ID NO: 226)
GXCXGXXTAN,
(SEQ ID NO: 227)
GGSTN,
(SEQ ID NO: 228)
GPXGXPGMRXE,
(SEQ ID NO: 229)
ALXTDGRXSG,
and
(SEQ ID NO: 230)
GHXXPEA

motifs at amino acid positions corresponding to the 93-101, 122-128, 193-202, 276-280, 482-491, 509-518, and 526-532 residues, respectively, of the E. coli dihydroxy acid dehydratase encoded by ilvD. Thus, a protein harboring one or more of these amino acid motifs can generally be expected to exhibit dihydroxy acid dehydratase activity.

[0155] Alcohol dehydrogenases capable of converting isobutyraldehyde to isobutanol may be derived from a variety of sources (e.g., bacterial, yeast, Archaea, etc.), including L. lactis (GenBank Accession No. YP_{—}003354381), B. cereus (GenBank Accession No. YP_{—}001374103.1), N. meningitidis (GenBank Accession No. CBA03965.1), S. sanguinis (GenBank Accession No. YP_{—}001035842.1), L. brevis (GenBank Accession No. YP_{—}794451.1), B. thuringiensis (GenBank Accession No. ZP_{—}04101989.1), P. acidilactici (GenBank Accession No. ZP_{—}06197454.1), B. subtilis (GenBank Accession No. EHA31115.1), N. crassa (GenBank Accession No. CAB91241.1) or S. cerevisiae ADH6 (GenBank Accession No. NP 014051.1). Additional alcohol dehydrogenases capable of converting isobutyraldehyde to isobutanol are described in commonly owned and co-pending US Publication Nos. 2011/0076733 and 2011/0201072. Motifs shared in common between the majority of alcohol dehydrogenases include:

(SEQ ID NO: 231)
C(H/G)(T/S)D(L/I)H,
(SEQ ID NO: 232)
GHEXXGXV,
(SEQ ID NO: 233)
(L/V)(Q/K/E)(V/I/K)G(D/Q)(R/H)(V/A),
(SEQ ID NO: 234)
CXXCXXC,
(SEQ ID NO: 235)
(C/A)(A/G/D)(G/A)XT(T/V),
and
(SEQ ID NO: 236)
G(L/A/C)G(G/P)(L/I/V)G

motifs at amino acid positions corresponding to the 39-44, 59-66, 76-82, 91-97, 147-152, and 171-176 residues, respectively, of the L. lactis alcohol dehydrogenase encoded by adhA. Thus, a protein harboring one or more of these amino acid motifs can generally be expected to exhibit alcohol dehydrogenase activity.

[0156] In another embodiment, the yeast microorganism may be engineered to have increased ability to convert pyruvate to isobutanol. In one embodiment, the yeast microorganism may be engineered to have increased ability to convert pyruvate to isobutyraldehyde. In another embodiment, the yeast microorganism may be engineered to have increased ability to convert pyruvate to keto-isovalerate. In another embodiment, the yeast microorganism may be engineered to have increased ability to convert pyruvate to 2,3-dihydroxyisovalerate. In another embodiment, the yeast microorganism may be engineered to have increased ability to convert pyruvate to acetolactate.

[0157] Furthermore, any of the genes encoding the foregoing enzymes (or any others mentioned herein (or any of the regulatory elements that control or modulate expression thereof)) may be optimized by genetic/protein engineering techniques, such as directed evolution or rational mutagenesis, which are known to those of ordinary skill in the art. Such action allows those of ordinary skill in the art to optimize the enzymes for expression and activity in yeast.

[0158] In an exemplary embodiment, pathway steps 2 and 5 of the isobutanol pathway may be carried out by KARI and ADH enzymes that utilize NADH (rather than NADPH) as a cofactor. The present inventors have found that utilization of NADH-dependent KARI (NKR) and ADH enzymes to catalyze pathway steps 2 and 5, respectively, surprisingly enables production of isobutanol at theoretical yield and/or under anaerobic conditions. An example of an NADH-dependent isobutanol pathway is illustrated in FIG. 2. Thus, in one embodiment, the recombinant microorganisms of the present invention may use an NKR to catalyze the conversion of acetolactate to produce 2,3-dihydroxyisovalerate. In another embodiment, the recombinant microorganisms of the present invention may use an NADH-dependent ADH to catalyze the conversion of isobutyraldehyde to produce isobutanol. In yet another embodiment, the recombinant microorganisms of the present invention may use both an NKR to catalyze the conversion of acetolactate to produce 2,3-dihydroxyisovalerate, and an NADH-dependent ADH to catalyze the conversion of isobutyraldehyde to produce isobutanol.

Isobutanol-Producing Metabolic Pathways with Improved KIVD Properties

[0159] The fourth step of the isobutanol producing metabolic pathway is catalyzed by a 2-keto acid decarboxylase, e.g., a keto-isovalerate decarboxylase (KIVD), which converts alpha-ketoisovalerate to isobutyraldehyde. 2-keto acid decarboxylases belong to a class of enzymes known as thiamin diphosphate-dependent decarboxylases. The active sites of thiamin diphosphate-dependent decarboxylases are characterized by the presence of two histidine residues, described herein as an “HH”-motif. This HH motif is found at amino acids 112-113 and 114-115 in the L. lactis KivD (SEQ ID NO: 197) and the S. cerevisiae PDC1 (SEQ ID NO: 241), respectively. Thiamin diphosphate-dependent decarboxylases harboring this characteristic HH-motif include pyruvate decarboxylases (PDCs), indolepyruvate decarboxylases (IPDCs), phenylpyruvate decarboxylases (PPDCs), and branched chain 2-keto acid decarboxylases, e.g., keto-isovalerate decarboxylases (KIVDs). Accordingly, the HH-motif is a structural feature that can quickly be used to identify a thiamin-diphosphate-dependent decarboxylase.

[0160] The present application relates to the identification of several thiamin diphosphate-dependent decarboxylase enzymes that exhibit high activity for the conversion of alpha-ketoisovalerate to isobutyraldehyde within an isobutanol production pathway. Moreover, the enzymes identified herein have low activity using pyruvate, thereby reducing the conversion of pyruvate—the starting material for many biosynthetic pathways—to the unwanted by-product ethanol in recombinant isobutanol producing microorganisms. Accordingly, this application describes methods of increasing isobutanol production through the use of recombinant microorganisms comprising enzymes with improved properties for the production of isobutanol.

[0161] As described herein, the present inventors have identified a KIVD substrate specificity motif “SQFVIMF” (SEQ ID NO: 237) which is generally predictive of: (a) high KIVD activity; (b) reduced PDC activity; and (c) a high KIV/pyruvate activity ratio. This SQFVIMF motif corresponds to the S286, Q377, F381, V461, I465, M538, and F542 residues of the L. lactis KIVD of SEQ ID NO: 197. Because the motif is generally predictive of enzymes exhibiting a high KIV/pyruvate activity ratio, decarboxylases with similarity to this motif are expected to find utility for the conversion of alpha-ketoisovalerate to isobutyraldehyde within an isobutanol production pathway.

[0162] Accordingly, one aspect of the application is directed to an isolated nucleic acid molecule encoding a polypeptide with keto-isovalerate decarboxylase (KIVD) activity, wherein said polypeptide comprises at least four of the SQFVIMF specificity residues corresponding to the S286, Q377, F381, V461, I465, M538, and F542 residues of the L. lactis KIVD of SEQ ID NO: 197. Polypeptides with KIVD activity comprising at least four of the SQFVIMF specificity residues are disclosed in the instant application, e.g., at SEQ ID NOs: 1-196. In one embodiment, said polypeptide contains four of the SQFVIMF specificity residues corresponding to the S286, Q377, F381, V461, I465, M538, and F542 residues of the L. lactis KIVD of SEQ ID NO: 197. In another embodiment, said polypeptide contains five of the SQFVIMF specificity residues corresponding to the S286, Q377, F381, V461, I465, M538, and F542 residues of the L. lactis KIVD of SEQ ID NO: 197. In yet another embodiment, said polypeptide contains six of the SQFVIMF specificity residues corresponding to the S286, Q377, F381, V461, I465, M538, and F542 residues of the L. lactis KIVD of SEQ ID NO: 197. In yet another embodiment, said polypeptide contains all seven of the SQFVIMF specificity residues corresponding to the S286, Q377, F381, V461, I465, M538, and F542 residues of the L. lactis KIVD of SEQ ID NO: 197.

[0163] As described herein, the present inventors have identified an additional KIVD substrate specificity motif “FTSILFL” (SEQ ID NO: 240) which is generally predictive of: (a) high KIVD activity; (b) reduced PDC activity; and (c) a high KIV/pyruvate activity ratio. This FTSILFL motif corresponds to the F305, T397, S401, I481, L485, F556, and L560 of the F. novicida decarboxylase of SEQ ID NO: 198. Because the motif is generally predictive of enzymes exhibiting a high KIV/pyruvate activity ratio, decarboxylases with similarity to this motif are expected to find utility for the conversion of alpha-ketoisovalerate to isobutyraldehyde within an isobutanol production pathway. Accordingly, another aspect of the application is directed to an isolated nucleic acid molecule encoding a polypeptide with keto-isovalerate decarboxylase (KIVD) activity, wherein said polypeptide comprises at least four of the FTSILFL specificity residues corresponding to the F305, T397, S401, I481, L485, F556, and L560 residues of the F. novicida decarboxylase of SEQ ID NO: 198. Polypeptides with KIVD activity comprising at least four of the FTSILFL specificity residues are disclosed in the instant application, e.g., at SEQ ID NOs: 198-214. In one embodiment, said polypeptide contains four of the FTSILFL specificity residues corresponding to the F305, T397, S401, I481, L485, F556, and L560 residues of the F. novicida decarboxylase of SEQ ID NO: 198. In another embodiment, said polypeptide contains five of the FTSILFL specificity residues corresponding to the F305, T397, S401, I481, L485, F556, and L560 residues of the F. novicida decarboxylase of SEQ ID NO: 198. In yet another embodiment, said polypeptide contains six of the FTSILFL specificity residues corresponding to the F305, T397, S401, I481, L485, F556, and L560 residues of the F. novicida decarboxylase of SEQ ID NO: 198. In yet another embodiment, said polypeptide contains all seven of the FTSILFL specificity residues corresponding to the F305, T397, S401, I481, L485, F556, and L560 residues of the F. novicida decarboxylase of SEQ ID NO: 198.

[0164] Another aspect of the application is directed to an isolated nucleic acid molecule encoding a polypeptide with keto-isovalerate decarboxylase (KIVD) activity, wherein said polypeptide is at least about 65% identical to a polypeptide selected from SEQ ID NOs 1-214. Further within the scope of present application are polypeptides with keto-isovalerate decarboxylase (KIVD) activity which are at least about 70%, 75%, 80%, 85%, 90%, 91%, 92%, 93%, 94%, 95%, 96%, 97%, 98%, 99%, or 99.5% identical to a polypeptide selected from SEQ ID NOs 1-214.

[0165] In one embodiment, the polypeptide with keto-isovalerate decarboxylase (KIVD) activity is derived from the genus Lactococcus. In a specific embodiment, the polypeptide with keto-isovalerate decarboxylase (KIVD) activity is derived from Lactococcus lactis. In another specific embodiment, the polypeptide with keto-isovalerate decarboxylase (KIVD) activity is selected from SEQ ID NOs: 1-4.

[0166] In another embodiment, the polypeptide with keto-isovalerate decarboxylase (KIVD) activity is derived from the genus Melissococcus. In a specific embodiment, the polypeptide with keto-isovalerate decarboxylase (KIVD) activity is derived from Melissococcus plutonius. In another specific embodiment, the polypeptide with keto-isovalerate decarboxylase (KIVD) activity comprises SEQ ID NO: 5.

[0167] In yet another embodiment, the polypeptide with keto-isovalerate decarboxylase (KIVD) activity is derived from the genus Listeria. In a specific embodiment, the polypeptide with keto-isovalerate decarboxylase (KIVD) activity is derived from Listeria grayi. In another specific embodiment, the polypeptide with keto-isovalerate decarboxylase (KIVD) activity comprises SEQ ID NO: 6.

[0168] In yet another embodiment, the polypeptide with keto-isovalerate decarboxylase (KIVD) activity is derived from a genus selected from Staphylococcus or Macrococcus. In a specific embodiment, the polypeptide with keto-isovalerate decarboxylase (KIVD) activity is derived from Staphylococcus aureus, Staphylococcus epidermidis, Staphylococcus capitis, Staphylococcus haemolyticus, Staphylococcus warneri, Staphylococcus caprae, Staphylococcus saprophyticus, Staphylococcus hominis, Staphylococcus carnosus, Staphylococcus lugdunensis, or Macrococcus caseolyticus. In another specific embodiment, the polypeptide with keto-isovalerate decarboxylase (KIVD) activity is selected from SEQ ID NOs: 7-44.

[0169] In yet another embodiment, the polypeptide with keto-isovalerate decarboxylase (KIVD) activity is derived from the genus Staphylococcus. In a specific embodiment, the polypeptide with keto-isovalerate decarboxylase (KIVD) activity is derived from Staphylococcus pseudintermedius. In another specific embodiment, the polypeptide with keto-isovalerate decarboxylase (KIVD) activity is selected from SEQ ID NOs: 45-46.

[0170] In yet another embodiment, the polypeptide with keto-isovalerate decarboxylase (KIVD) activity is derived from a genus selected from Bacillus or Clostridium. In a specific embodiment, the polypeptide with keto-isovalerate decarboxylase (KIVD) activity is derived from Bacillus cereus or Clostridium acetobutylicum. In another specific embodiment, the polypeptide with keto-isovalerate decarboxylase (KIVD) activity is selected from SEQ ID NOs: 47-48.

[0171] In yet another embodiment, the polypeptide with keto-isovalerate decarboxylase (KIVD) activity is derived from the genus selected Bacillus. In a specific embodiment, the polypeptide with keto-isovalerate decarboxylase (KIVD) activity is derived from Bacillus anthracis, Bacillus cereus, or Bacillus thuringiensis. In another specific embodiment, the polypeptide with keto-isovalerate decarboxylase (KIVD) activity is selected from SEQ ID NOs: 49-90.

[0172] In yet another embodiment, the polypeptide with keto-isovalerate decarboxylase (KIVD) activity is derived from a genus selected from the genus Helicobacter. In a specific embodiment, the polypeptide with keto-isovalerate decarboxylase (KIVD) activity is derived from Helicobacter felis or Helicobacter mustelae. In another specific embodiment, the polypeptide with keto-isovalerate decarboxylase (KIVD) activity is selected from SEQ ID NOs: 91-92.

[0173] In yet another embodiment, the polypeptide with keto-isovalerate decarboxylase (KIVD) activity is derived from the genus Sarcina. In a specific embodiment, the polypeptide with keto-isovalerate decarboxylase (KIVD) activity is derived from Sarcina ventriculi. In another specific embodiment, the polypeptide with keto-isovalerate decarboxylase (KIVD) activity comprises SEQ ID NO: 93.

[0174] In yet another embodiment, the polypeptide with keto-isovalerate decarboxylase (KIVD) activity is derived from the genus Nostoc. In a specific embodiment, the polypeptide with keto-isovalerate decarboxylase (KIVD) activity is derived from Nostoc punctiforme. In another specific embodiment, the polypeptide with keto-isovalerate decarboxylase (KIVD) activity comprises SEQ ID NO: 94.

[0175] In yet another embodiment, the polypeptide with keto-isovalerate decarboxylase (KIVD) activity is derived from the genus Salinispora. In a specific embodiment, the polypeptide with keto-isovalerate decarboxylase (KIVD) activity is derived from Salinispora arenicola. In another specific embodiment, the polypeptide with keto-isovalerate decarboxylase (KIVD) activity comprises SEQ ID NO: 95.

[0176] In yet another embodiment, the polypeptide with keto-isovalerate decarboxylase (KIVD) activity is derived from the genus Leishmania. In a specific embodiment, the polypeptide with keto-isovalerate decarboxylase (KIVD) activity is derived from Leishmania mexicana, Leishmania major, Leishmania braziliensis, Leishmania donovani, or Leishmania infantum. In another specific embodiment, the polypeptide with keto-isovalerate decarboxylase (KIVD) activity is selected from SEQ ID NOs: 96-100.

[0177] In yet another embodiment, the polypeptide with keto-isovalerate decarboxylase (KIVD) activity is derived from an Enterobacteriaceae. In a specific embodiment, the polypeptide with keto-isovalerate decarboxylase (KIVD) activity is derived from Enterobacteriaceae bacterium 9_{—}2_{—}54FAA. In another specific embodiment, the polypeptide with keto-isovalerate decarboxylase (KIVD) activity comprises SEQ ID NO: 101.

[0178] In yet another embodiment, the polypeptide with keto-isovalerate decarboxylase (KIVD) activity is derived from a genus selected from Salmonella, Klebsiella, Enterobacter, Cronobacter, or Citrobacter. In a specific embodiment, the polypeptide with keto-isovalerate decarboxylase (KIVD) activity is derived from Salmonella enterica, Klebsiella pneumoniae, Klebsiella veriicola, Klebsiella sp. 1_{—}1_{—}55, Klebsiella sp. MS 92-3, Enterobacter aerogenes, Enterobacter cancerogenus, Enterobacter sp. 638, Enterobacter cloacae, Enterobacter hormaechei, Cronobacter turicensis, or Cronobacter sakazakii. In another specific embodiment, the polypeptide with keto-isovalerate decarboxylase (KIVD) activity is selected from SEQ ID NOs: 102-143.

[0179] In yet another embodiment, the polypeptide with keto-isovalerate decarboxylase (KIVD) activity is derived from the genus Pantoea. In a specific embodiment, the polypeptide with keto-isovalerate decarboxylase (KIVD) activity is derived from Pantoea sp. aB, Pantoea ananatis, Pantoea sp. At-9b, Pantoea agglomerans, or Pantoea vagans. In another specific embodiment, the polypeptide with keto-isovalerate decarboxylase (KIVD) activity is selected from SEQ ID NOs: 144-149.

[0180] In yet another embodiment, the polypeptide with keto-isovalerate decarboxylase (KIVD) activity is derived from the genus Erwinia. In a specific embodiment, the polypeptide with keto-isovalerate decarboxylase (KIVD) activity is derived from Erwinia amylovora, Erwinia tasmaniensis, Erwinia sp. Ejp617, Erwinia billingiae, or Erwinia pyrifoliae. In another specific embodiment, the polypeptide with keto-isovalerate decarboxylase (KIVD) activity is selected from SEQ ID NOs: 150-155.

[0181] In yet another embodiment, the polypeptide with keto-isovalerate decarboxylase (KIVD) activity is derived from the genus Pectobacterium. In a specific embodiment, the polypeptide with keto-isovalerate decarboxylase (KIVD) activity is derived from Pectobacterium carotovorum or Pectobacterium atrosepticum. In another specific embodiment, the polypeptide with keto-isovalerate decarboxylase (KIVD) activity is selected from SEQ ID NOs: 156-158.

[0182] In yet another embodiment, the polypeptide with keto-isovalerate decarboxylase (KIVD) activity is derived from the genus Rahnella. In a specific embodiment, the polypeptide with keto-isovalerate decarboxylase (KIVD) activity is derived from Rahnella sp. Y9602. In another specific embodiment, the polypeptide with keto-isovalerate decarboxylase (KIVD) activity comprises SEQ ID NO: 159.

[0183] In yet another embodiment, the polypeptide with keto-isovalerate decarboxylase (KIVD) activity is derived from a genus selected from Yersinia, Serratia, or Nasonia. In a specific embodiment, the polypeptide with keto-isovalerate decarboxylase (KIVD) activity is derived from Yersinia aldovae, Yersinia rohdei, Yersinia enterocolitica, Yersinia kristensenii, Yersinia mollaretii, Serratia symbiotica, Serratia sp. AS12, Serratia odorifera, Serratia proteamaculans, or Nasonia vitripennis. In another specific embodiment, the polypeptide with keto-isovalerate decarboxylase (KIVD) activity is selected from SEQ ID NOs: 160-172.

[0184] In yet another embodiment, the polypeptide with keto-isovalerate decarboxylase (KIVD) activity is derived from the genus Kineococcus. In a specific embodiment, the polypeptide with keto-isovalerate decarboxylase (KIVD) activity is derived from Kineococcus radiotolerans. In another specific embodiment, the polypeptide with keto-isovalerate decarboxylase (KIVD) activity comprises SEQ ID NO: 173.

[0185] In yet another embodiment, the polypeptide with keto-isovalerate decarboxylase (KIVD) activity is derived from the genus Psychrobacter. In a specific embodiment, the polypeptide with keto-isovalerate decarboxylase (KIVD) activity is derived from Psychrobacter arcticus, Psychrobacter cryohalolentis, Psychrobacter sp. PRwf-1, or Psychrobacter sp. 1501. In another specific embodiment, the polypeptide with keto-isovalerate decarboxylase (KIVD) activity is selected from SEQ ID NOs: 174-177.

[0186] In yet another embodiment, the polypeptide with keto-isovalerate decarboxylase (KIVD) activity is derived from the genus Corynebacterium. In a specific embodiment, the polypeptide with keto-isovalerate decarboxylase (KIVD) activity is derived from Corynebacterium striatum. In another specific embodiment, the polypeptide with keto-isovalerate decarboxylase (KIVD) activity comprises SEQ ID NO: 178.

[0187] In yet another embodiment, the polypeptide with keto-isovalerate decarboxylase (KIVD) activity is derived from the genus Corynebacterium. In a specific embodiment, the polypeptide with keto-isovalerate decarboxylase (KIVD) activity is derived from Corynebacterium kroppenstedtii. In another specific embodiment, the polypeptide with keto-isovalerate decarboxylase (KIVD) activity comprises SEQ ID NO: 179.

[0188] In yet another embodiment, the polypeptide with keto-isovalerate decarboxylase (KIVD) activity is derived from the genus Mycobacterium. In a specific embodiment, the polypeptide with keto-isovalerate decarboxylase (KIVD) activity is derived from Mycobacterium testaceum. In another specific embodiment, the polypeptide with keto-isovalerate decarboxylase (KIVD) activity comprises SEQ ID NO: 180.

[0189] In yet another embodiment, the polypeptide with keto-isovalerate decarboxylase (KIVD) activity is derived from the genus Nakamurella. In a specific embodiment, the polypeptide with keto-isovalerate decarboxylase (KIVD) activity is derived from Nakamurella multipartita. In another specific embodiment, the polypeptide with keto-isovalerate decarboxylase (KIVD) activity comprises SEQ ID NO: 181.

[0190] In yet another embodiment, the polypeptide with keto-isovalerate decarboxylase (KIVD) activity is derived from the genus Segniliparus. In a specific embodiment, the polypeptide with keto-isovalerate decarboxylase (KIVD) activity is derived from Segniliparus rotundus or Sengiliparus rugosus In another specific embodiment, the polypeptide with keto-isovalerate decarboxylase (KIVD) activity is selected from SEQ ID NOs: 182-183.

[0191] In yet another embodiment, the polypeptide with keto-isovalerate decarboxylase (KIVD) activity is derived from the genus Mycobacterium. In a specific embodiment, the polypeptide with keto-isovalerate decarboxylase (KIVD) activity is derived from Mycobacterium marinum, Mycobacterium tuberculosis, Mycobacterium avium, Mycobacterium kansasii, Mycobacterium leprae, Mycobacterium parascrofulaceum, Mycobacterium smegmatis, Mycobacterium ulcerans, or Mycobacterium intracellulare. In another specific embodiment, the polypeptide with keto-isovalerate decarboxylase (KIVD) activity is selected from SEQ ID NOs: 184-196.

[0192] In yet another embodiment, the application relates to a recombinant microorganism comprising at least one nucleic acid molecule encoding a polypeptide with keto-isovalerate decarboxylase (KIVD) activity, wherein said polypeptide is at least about 65% identical to a polypeptide selected from SEQ ID NOs: 198-208. In a specific embodiment, the polypeptide with keto-isovalerate decarboxylase (KIVD) activity is derived from the genus Francisella. In another specific embodiment, the polypeptide with keto-isovalerate decarboxylase (KIVD) activity is derived from Francisella novicida, Francisella tularensis, or Francisella philomiragia.

[0193] In yet another embodiment, the application relates to a recombinant microorganism comprising at least one nucleic acid molecule encoding a polypeptide with keto-isovalerate decarboxylase (KIVD) activity, wherein said polypeptide is at least about 65% identical to SEQ ID NO: 209. In a specific embodiment, the polypeptide with keto-isovalerate decarboxylase (KIVD) activity is derived from the genus Beijerinckia. In another specific embodiment, the polypeptide with keto-isovalerate decarboxylase (KIVD) activity is derived from Beijerinckia indica.

[0194] In yet another embodiment, the application relates to a recombinant microorganism comprising at least one nucleic acid molecule encoding a polypeptide with keto-isovalerate decarboxylase (KIVD) activity, wherein said polypeptide is at least about 65% identical to a polypeptide selected from SEQ ID NOs: 210-211. In a specific embodiment, the polypeptide with keto-isovalerate decarboxylase (KIVD) activity is derived from the genus Desulfovibrio.

[0195] In yet another embodiment, the application relates to a recombinant microorganism comprising at least one nucleic acid molecule encoding a polypeptide with keto-isovalerate decarboxylase (KIVD) activity, wherein said polypeptide is at least about 65% identical to a polypeptide selected from SEQ ID NOs: 212-213. In a specific embodiment, the polypeptide with keto-isovalerate decarboxylase (KIVD) activity is derived from the genus Edwardsiella. In another specific embodiment, the polypeptide with keto-isovalerate decarboxylase (KIVD) activity is derived from Edwardsiella tarda or Edwardsiella ictaluri.

[0196] In yet another embodiment, the application relates to a recombinant microorganism comprising at least one nucleic acid molecule encoding a polypeptide with keto-isovalerate decarboxylase (KIVD) activity, wherein said polypeptide is at least about 65% identical to SEQ ID NO: 214. In a specific embodiment, the polypeptide with keto-isovalerate decarboxylase (KIVD) activity is derived from the genus Singuliasphaera. In another specific embodiment, the polypeptide with keto-isovalerate decarboxylase (KIVD) activity is derived from Singuliasphaera acidiphila.

[0197] The invention also includes fragments of the disclosed polypeptides with keto-isovalerate decarboxylase (KIVD) activity which comprise at least 50, 100, 150, 200, 250, 300, 350, 400, 450, 500, 550, or 600 amino acid residues and retain one or more activities associated with keto-isovalerate decarboxylase (KIVD) activity. Such fragments may be obtained by deletion mutation, by recombinant techniques that are routine and well-known in the art, or by enzymatic digestion of the polypeptides of interest using any of a number of well-known proteolytic enzymes. The invention further includes nucleic acid molecules which encode the above described polypeptides and polypeptide fragments exhibiting keto-isovalerate decarboxylase (KIVD) activity.

[0198] Another aspect of the application relates to a recombinant microorganism comprising at least one nucleic acid molecule encoding a polypeptide with keto-isovalerate decarboxylase (KIVD) activity, wherein said polypeptide is at least about 65% identical to a polypeptide selected from SEQ ID NOs 1-214. Further within the scope of present application are recombinant microorganisms comprising at least one nucleic acid molecule encoding a polypeptide with keto-isovalerate decarboxylase (KIVD) activity, wherein said polypeptide is at least about 70%, 75%, 80%, 85%, 90%, 91%, 92%, 93%, 94%, 95%, 96%, 97%, 98%, 99%, or 99.5% identical to a polypeptide selected from SEQ ID NOs 1-214.

Isobutanol-Producing Metabolic Pathways with Modified Decarboxylase Enzymes Catalyzing the Conversion of Alpha-Ketoisovalerate to Isobutyraldehyde

[0199] As described herein, the present inventors have identified a group of polypeptides with keto-isovalerate decarboxylase (KIVD) activity. One desirable feature of a polypeptide with keto-isovalerate decarboxylase (KIVD) activity is the ability to exhibit high activity for the conversion of alpha-ketoisovalerate to isobutyraldehyde within an isobutanol production pathway. Another desirable property of a polypeptide with keto-isovalerate decarboxylase (KIVD) activity is low activity using pyruvate, thereby reducing the conversion of pyruvate to the unwanted by-product ethanol in recombinant isobutanol producing microorganisms. The present inventors have identified several beneficial mutations which can be made to an existing decarboxylase enzyme to improve the decarboxylase enzyme's ability to catalyze the conversion of alpha-ketoisovalerate to isobutyraldehyde with high specificity.

[0200] In one aspect, the application relates to a decarboxylase enzyme which has been modified or mutated to increase the ability of the enzyme to preferentially utilize keto-isovalerate as its substrate. Examples of such decarboxylase enzymes include enzymes having one or more modifications or mutations at positions corresponding to amino acids selected from: (a) aspartic acid 26 of the L. lactis KIVD (SEQ ID NO: 197); (b) histidine 112 of the L. lactis KIVD (SEQ ID NO: 197); (c) histidine 113 of the L. lactis KIVD (SEQ ID NO: 197); (d) glycine 402 of the L. lactis KIVD (SEQ ID NO: 197); and (e) glutamic acid 462 of the L. lactis KIVD (SEQ ID NO: 197). In an exemplary embodiment, the modified decarboxylase enzyme is derived from a corresponding unmodified decarboxylase that is at least about 65%, 70%, 75%, 80%, 85%, 90%, 91%, 92%, 93%, 94%, 95%, 96%, 97%, 98%, 99%, or 99.5% identical to a polypeptide selected from SEQ ID NOs 1-196.

[0201] In one specific embodiment, the application is directed to a modified decarboxylase enzyme, wherein the residue corresponding to position 26 of the L. lactis KIVD (SEQ ID NO: 197) is replaced with a residue selected from aspartic acid and glutamic acid. In another specific embodiment, the application is directed to a modified decarboxylase enzyme, wherein the residue corresponding to position 112 of the L. lactis KIVD (SEQ ID NO: 197) is replaced with a residue selected from histidine, arginine, or lysine. In yet another specific embodiment, the application is directed to a modified decarboxylase enzyme, wherein the residue corresponding to position 113 of the L. lactis KIVD (SEQ ID NO: 197) is replaced with a residue selected from histidine, arginine, or lysine. In yet another specific embodiment, the application is directed to a modified decarboxylase enzyme, wherein the residue corresponding to position 402 of the L. lactis KIVD (SEQ ID NO: 197) is replaced with a residue selected from glycine, cysteine, or proline. In yet another specific embodiment, the application is directed to a modified decarboxylase enzyme, wherein the residue corresponding to position 462 of the L. lactis KIVD (SEQ ID NO: 197) is replaced with a residue selected from glutamic acid or aspartic acid.

[0202] In another aspect, the application relates to a decarboxylase enzyme which has been modified or mutated to alter one or more substrate-specificity residues. Examples of such decarboxylase enzymes include enzymes having one or more modifications or mutations at positions corresponding to amino acids selected from: (a) serine 286 of the L. lactis KIVD (SEQ ID NO: 197); (b) glutamine 377 of the L. lactis KIVD (SEQ ID NO: 197); (c) phenylalanine 381 of the L. lactis KIVD (SEQ ID NO: 197); (d) valine 461 of the L. lactis KIVD (SEQ ID NO: 197); (e) isoleucine 465 of the L. lactis KIVD (SEQ ID NO: 197); (f) methionine 538 of the L. lactis KIVD (SEQ ID NO: 197); and (g) phenylalanine 542 of the L. lactis KIVD (SEQ ID NO: 197). In an exemplary embodiment, the modified decarboxylase enzyme is derived from a corresponding unmodified decarboxylase that is at least about 65%, 70%, 75%, 80%, 85%, 90%, 91%, 92%, 93%, 94%, 95%, 96%, 97%, 98%, 99%, or 99.5% identical to a polypeptide selected from SEQ ID NOs 1-196.

[0203] In one specific embodiment, the application is directed to a modified decarboxylase enzyme, wherein the residue corresponding to position 286 of the L. lactis KIVD (SEQ ID NO: 197) is replaced with a residue selected from serine, threonine, asparagine, glycine, alanine, proline, glutamine, and aspartic acid. In an exemplary embodiment, the residue corresponding to position 286 of the L. lactis KIVD (SEQ ID NO: 197) is replaced with a serine residue. In another specific embodiment, the application is directed to a modified decarboxylase enzyme, wherein the residue corresponding to position 377 of the L. lactis KIVD (SEQ ID NO: 197) is replaced with a residue selected from glutamine, threonine, serine, and asparagine. In an exemplary embodiment, the residue corresponding to position 377 of the L. lactis KIVD (SEQ ID NO: 197) is replaced with a glutamine residue. In yet another specific embodiment, the application is directed to a modified decarboxylase enzyme, wherein the residue corresponding to position 381 of the L. lactis KIVD (SEQ ID NO: 197) is replaced with a residue selected from phenylalanine, alanine, isoleucine, leucine, methionine, tryptophan, tyrosine, and valine. In an exemplary embodiment, the residue corresponding to position 381 of the L. lactis KIVD (SEQ ID NO: 197) is replaced with a phenylalanine residue. In yet another specific embodiment, the application is directed to a modified decarboxylase enzyme, wherein the residue corresponding to position 461 of the L. lactis KIVD (SEQ ID NO: 197) is replaced with a residue selected from valine, phenylalanine, alanine, isoleucine, leucine, methionine, tryptophan, and tyrosine. In an exemplary embodiment, the residue corresponding to position 461 of the L. lactis KIVD (SEQ ID NO: 197) is replaced with a valine residue. In yet another specific embodiment, the application is directed to a modified decarboxylase enzyme, wherein the residue corresponding to position 465 of the L. lactis KIVD (SEQ ID NO: 197) is replaced with a residue selected from isoleucine, valine, phenylalanine, alanine, leucine, methionine, tryptophan, and tyrosine. In an exemplary embodiment, the residue corresponding to position 465 of the L. lactis KIVD (SEQ ID NO: 197) is replaced with an isoleucine residue. In yet another specific embodiment, the application is directed to a modified decarboxylase enzyme, wherein the residue corresponding to position 538 of the L. lactis KIVD (SEQ ID NO: 197) is replaced with a residue selected from methionine, isoleucine, leucine, valine, alanine, cysteine, glycine, phenylalanine, proline, tryptophan, and tyrosine. In an exemplary embodiment, the residue corresponding to position 465 of the L. lactis KIVD (SEQ ID NO: 197) is replaced with a methionine residue. In yet another specific embodiment, the application is directed to a modified decarboxylase enzyme, wherein the residue corresponding to position 542 of the L. lactis KIVD (SEQ ID NO: 197) is replaced with a residue selected from phenylalanine, isoleucine, leucine, methionine, valine, alanine, cysteine, glycine, proline, tryptophan, and tyrosine. In an exemplary embodiment, the residue corresponding to position 542 of the L. lactis KIVD (SEQ ID NO: 197) is replaced with a phenylalanine residue.

[0204] In another aspect, the application relates to a decarboxylase enzymes having one or more modifications or mutations at positions corresponding to amino acids selected from: (a) phenylalanine 305 of the F. novicida decarboxylase (SEQ ID NO: 198); (b) threonine 397 of the F. novicida decarboxylase (SEQ ID NO: 198); (c) serine 401 of the F. novicida decarboxylase (SEQ ID NO: 198); (d) isoleucine 481 of the F. novicida decarboxylase (SEQ ID NO: 198); (e) leucine 485 of the F. novicida decarboxylase (SEQ ID NO: 198); (f) phenylalanine 556 of the F. novicida decarboxylase (SEQ ID NO: 198); and (g) leucine 560 of the F. novicida decarboxylase (SEQ ID NO: 198). In an exemplary embodiment, the modified decarboxylase enzyme is derived from a corresponding unmodified decarboxylase that is at least about 65%, 70%, 75%, 80%, 85%, 90%, 91%, 92%, 93%, 94%, 95%, 96%, 97%, 98%, 99%, or 99.5% identical to a polypeptide selected from SEQ ID NOs 1-214.

[0205] In one specific embodiment, the application is directed to a modified decarboxylase enzyme, wherein the residue corresponding to position 305 of the F. novicida decarboxylase (SEQ ID NO: 198) is replaced with a residue selected from phenylalanine, tryptophan, histidine, and tyrosine. In an exemplary embodiment, the residue corresponding to position 305 of the F. novicida decarboxylase (SEQ ID NO: 198) is replaced with a phenylalanine residue. In another specific embodiment, the application is directed to a modified decarboxylase enzyme, wherein the residue corresponding to position 397 of the F. novicida decarboxylase (SEQ ID NO: 198) is replaced with a residue selected from threonine, serine, asparagine, and glutamine. In an exemplary embodiment, the residue corresponding to position 397 of the F. novicida decarboxylase (SEQ ID NO: 198) is replaced with a threonine residue. In yet another specific embodiment, the application is directed to a modified decarboxylase enzyme, wherein the residue corresponding to position 401 of the F. novicida decarboxylase (SEQ ID NO: 198) is replaced with a residue selected from serine, threonine, asparagine, and glutamine. In an exemplary embodiment, the residue corresponding to position 401 of the F. novicida decarboxylase (SEQ ID NO: 198) is replaced with a serine residue. In yet another specific embodiment, the application is directed to a modified decarboxylase enzyme, wherein the residue corresponding to position 481 of the F. novicida decarboxylase (SEQ ID NO: 198) is replaced with a residue selected from isoleucine, methionine, leucine, valine, alanine, phenylalanine, tryptophan, and tyrosine. In an exemplary embodiment, the residue corresponding to position 481 of the F. novicida decarboxylase (SEQ ID NO: 198) is replaced with an isoleucine residue. In yet another specific embodiment, the application is directed to a modified decarboxylase enzyme, wherein the residue corresponding to position 485 of the F. novicida decarboxylase (SEQ ID NO: 198) is replaced with a residue selected from leucine, isoleucine, valine, phenylalanine, alanine, methionine, tryptophan, and tyrosine. In an exemplary embodiment, the residue corresponding to position 485 of the F. novicida decarboxylase (SEQ ID NO: 198) is replaced with a leucine residue. In yet another specific embodiment, the application is directed to a modified decarboxylase enzyme, wherein the residue corresponding to position 556 of the F. novicida decarboxylase (SEQ ID NO: 198) is replaced with a residue selected from phenylalanine, methionine, isoleucine, leucine, valine, alanine, cysteine, glycine, proline, tryptophan, and tyrosine. In an exemplary embodiment, the residue corresponding to position 556 of the F. novicida decarboxylase (SEQ ID NO: 198) is replaced with a phenylalanine residue. In yet another specific embodiment, the application is directed to a modified decarboxylase enzyme, wherein the residue corresponding to position 560 of the F. novicida decarboxylase (SEQ ID NO: 198) is replaced with a residue selected from leucine, isoleucine, leucine, methionine, valine, alanine, cysteine, glycine, and proline. In an exemplary embodiment, the residue corresponding to position 560 of the F. novicida decarboxylase (SEQ ID NO: 198) is replaced with a leucine residue.

[0206] In another aspect, the application relates to a pyruvate decarboxylase (PDC) enzyme which has been modified or mutated to alter one or more substrate-specificity residues. In an exemplary embodiment, the substrate specificity of said PDC has been altered to prefer α-ketoisovalerate instead of its natively preferred substrate, pyruvate. Accordingly, the present application provides PDC variants with substrate specificity towards α-ketoisovalerate for use in the conversion of α-ketoisovalerate to isobutyraldehyde within the isobutanol biosynthetic pathway.

[0207] In certain embodiments, the application relates to pyruvate decarboxylase variants having one or more modifications or mutations at positions corresponding to amino acids selected from: (a) phenylalanine 292 of the S. cerevisiae PDC1 (SEQ ID NO: 241); (b) threonine 388 of the S. cerevisiae PDC1 (SEQ ID NO: 241); (c) alanine 392 of the S. cerevisiae PDC1 (SEQ ID NO: 241); (d) serine 408 of the S. cerevisiae PDC1 (SEQ ID NO: 241); (e) valine 410 of the S. cerevisiae PDC1 (SEQ ID NO: 241); (f) isoleucine 476 of the S. cerevisiae PDC1 (SEQ ID NO: 241); (g) glutamine 552 of the S. cerevisiae PDC1 (SEQ ID NO: 241); and (h) threonine 556 of the S. cerevisiae PDC1 (SEQ ID NO: 241). In an exemplary embodiment, the modified decarboxylase enzyme is derived from a corresponding unmodified decarboxylase that is at least about 65%, 70%, 75%, 80%, 85%, 90%, 91%, 92%, 93%, 94%, 95%, 96%, 97%, 98%, 99%, or 99.5% identical to a wild-type pyruvate decarboxylase. In one embodiment, the wild-type, unmodified pyruvate decarboxylase is obtained from a yeast microorganism. In a further embodiment, the wild-type, unmodified pyruvate decarboxylase is obtained from a yeast microorganism classified into a genera selected from the group consisting of Saccharomyces, Kluyveromyces, Candida, Pichia, Issatchenkia, Debaryomyces, Hansenula, Pachysolen, Yarrowia, Schizosaccharomyces, Tricosporon, Rhodotorula, and Myxozyma. In another further embodiment, the wild-type, unmodified pyruvate decarboxylase is obtained from a Saccharomyces yeast. In an exemplary embodiment, the wild-type, unmodified pyruvate decarboxylase is obtained from Saccharomyces cerevisiae. In another exemplary embodiment, the wild-type, unmodified pyruvate decarboxylase is PDC1 (SEQ ID NO: 241), PDC5 (SEQ ID NO: 242), or PDC6 (SEQ ID NO: 243) of S. cerevisiae. In yet another exemplary embodiment, the wild-type, unmodified pyruvate decarboxylase is selected from SEQ ID NOs: 244-251.

[0208] In one specific embodiment, the application is directed to a modified decarboxylase enzyme, wherein the residue corresponding to position 292 of the S. cerevisiae PDC1 (SEQ ID NO: 241) is replaced with a residue selected from serine, threonine, asparagine, glutamine, and tyrosine. In an exemplary embodiment, the residue corresponding to position 292 of the S. cerevisiae PDC1 (SEQ ID NO: 241) is replaced with a serine residue. In another exemplary embodiment, the residue corresponding to position 292 of the S. cerevisiae PDC1 (SEQ ID NO: 241) is replaced with a threonine residue. In another specific embodiment, the application is directed to a modified decarboxylase enzyme, wherein the residue corresponding to position 388 of the S. cerevisiae PDC1 (SEQ ID NO: 241) is replaced with a residue selected from glutamine, threonine, serine, and asparagine. In an exemplary embodiment, the residue corresponding to position 388 of the S. cerevisiae PDC1 (SEQ ID NO: 241) is replaced with a glutamine residue. In yet another specific embodiment, the application is directed to a modified decarboxylase enzyme, wherein the residue corresponding to position 392 of the S. cerevisiae PDC1 (SEQ ID NO: 241) is replaced with a residue selected from serine, phenylalanine, alanine, cysteine, threonine, asparagine, and glutamine. In an exemplary embodiment, the residue corresponding to position 392 of the S. cerevisiae PDC1 (SEQ ID NO: 241) is replaced with a serine residue. In another exemplary embodiment, the residue corresponding to position 392 of the S. cerevisiae PDC1 (SEQ ID NO: 241) is replaced with a residue selected from phenylalanine, cysteine, and alanine. In yet another specific embodiment, the application is directed to a modified decarboxylase enzyme, wherein the residue corresponding to position 408 of the S. cerevisiae PDC1 (SEQ ID NO: 241) is replaced with a residue selected from glycine and serine. In an exemplary embodiment, the residue corresponding to position 408 of the S. cerevisiae PDC1 (SEQ ID NO: 241) is replaced with a glycine residue. In yet another specific embodiment, the application is directed to a modified decarboxylase enzyme, wherein the residue corresponding to position 410 of the S. cerevisiae PDC1 (SEQ ID NO: 241) is replaced with a residue selected from proline and valine. In an exemplary embodiment, the residue corresponding to position 410 of the S. cerevisiae PDC1 (SEQ ID NO: 241) is replaced with a proline residue. In yet another specific embodiment, the application is directed to a modified decarboxylase enzyme, wherein the residue corresponding to position 476 of the S. cerevisiae PDC1 (SEQ ID NO: 241) is replaced with a residue selected from valine, methionine, leucine, alanine, phenylalanine, tryptophan, and tyrosine. In an exemplary embodiment, the residue corresponding to position 476 of the S. cerevisiae PDC1 (SEQ ID NO: 241) is replaced with a valine residue. In yet another specific embodiment, the application is directed to a modified decarboxylase enzyme, wherein the residue corresponding to position 552 of the S. cerevisiae PDC1 (SEQ ID NO: 241) is replaced with a residue selected from methionine, leucine, isoleucine, valine, glutamine, phenylalanine, alanine, tryptophan, and tyrosine. In an exemplary embodiment, the residue corresponding to position 552 of the S. cerevisiae PDC1 (SEQ ID NO: 241) is replaced with a methionine residue. In another exemplary embodiment, the residue corresponding to position 552 of the S. cerevisiae PDC1 (SEQ ID NO: 241) is replaced with a residue selected from leucine, isoleucine, and valine. In yet another specific embodiment, the application is directed to a modified decarboxylase enzyme, wherein the residue corresponding to position 556 of the S. cerevisiae PDC1 (SEQ ID NO: 241) is replaced with a residue selected from isoleucine, phenylalanine, methionine, leucine, valine, threonine, alanine, cysteine, glycine, proline, tryptophan, and tyrosine. In an exemplary embodiment, the residue corresponding to position 556 of the S. cerevisiae PDC1 (SEQ ID NO: 241) is replaced with an isoleucine residue. In another exemplary embodiment, the residue corresponding to position 556 of the S. cerevisiae PDC1 (SEQ ID NO: 241) is replaced with a residue selected from leucine, phenylalanine, and valine.

[0209] The positions corresponding to the D26, H112, H113, S286, Q377, F381, V461, E462, I465, M538, and F542 residues of the L. lactis KIVD (SEQ ID NO: 197) may be readily identified for by one of skill in the art for any decarboxylase enzyme, including, but not limited to, those identified herein (e.g., the decarboxylases of SEQ ID NOs: 1-214). Likewise, the positions corresponding to the F305, T397, S401, I481, L485, F556, and L560 residues of the F. novicida decarboxylase (SEQ ID NO: 198) may be readily identified for by one of skill in the art for any decarboxylase enzyme, including, but not limited to, those identified herein (e.g., the decarboxylases of SEQ ID NOs: 1-214). Similarly, the positions corresponding to the F292, T388, A392, S408, V410, 1476, Q552, and T556 residues of the S. cerevisiae PDC1 (SEQ ID NO: 241) may be readily identified for by one of skill in the art for any known pyruvate decarboxylase enzyme. It will be readily apparent to those of skill in the art that the numbering of amino acids in decarboxylases other than SEQ ID NOs: 197, 198, and 241 may be different than that set forth for SEQ ID NOs: 197, 198, and 241, respectively. Corresponding amino acids in other decarboxylases are easily identified by visual inspection of the amino acid sequences or by using commercially available homology software programs. Thus, given the defined regions for changes and the assays described in the present application, one with skill in the art can make one or a number of modifications which would result in an increased ability to specifically catalyze the conversion of alpha-ketoisovalerate to isobutyraldehyde, in any decarboxylase enzyme of interest.

[0210] The application also includes fragments of the modified decarboxylase enzymes which comprise at least 50, 100, 150, 200, 250, 300, 350, 400, 450, 500, 550, or 600 amino acid residues and retain one or more activities associated with decarboxylase enzymes. Such fragments may be obtained by deletion mutation, by recombinant techniques that are routine and well-known in the art, or by enzymatic digestion of the decarboxylase enzyme(s) of interest using any of a number of well-known proteolytic enzymes. The invention further includes nucleic acid molecules which encode the above described mutant decarboxylase enzymes and decarboxylase enzyme fragments.

[0211] The application also includes modified decarboxylases comprising an amino acid sequence that can be optimally aligned with the corresponding unmodified, wild-type decarboxylase to generate a similarity score which is at least about 50%, more preferably at least about 60%, more preferably at least about 70%, more preferably at least about 80%, more preferably at least about 90%, or most preferably at least about 95% of the score for the reference sequence using the BLOSUM62 matrix, with a gap existence penalty of 11 and a gap extension penalty of 1.

[0212] Similarity scores provide a predictive means of attributing conserved function in a variant protein. Importantly, these scores are maximally predictive of conserved function, allowing for coverage of functional sequence variants while more accurately excluding non-functional variants. The exclusion of non-functional variants is best realized using a sequence identifier that is maximally predictive of conserved function, which is satisfied by the similarity score approach. See, e.g., Holman, 21 Santa Clara Computer & High Tech L.J. 55 (2004).

[0213] Two sequences are “optimally aligned” when they are aligned for similarity scoring using a defined amino acid substitution matrix (e.g., BLOSUM62), gap existence penalty and gap extension penalty so as to arrive at the highest score possible for that pair of sequences. Amino acid substitution matrices and their use in quantifying the similarity between two sequences are well-known in the art. The BLOSUM62 matrix is often used as a default scoring substitution matrix in sequence alignment protocols such as Gapped BLAST 2.0. The gap existence penalty is imposed for the introduction of a single amino acid gap in one of the aligned sequences, and the gap extension penalty is imposed for each additional empty amino acid position inserted into an already opened gap. The alignment is defined by the amino acids positions of each sequence at which the alignment begins and ends, and optionally by the insertion of a gap or multiple gaps in one or both sequences, so as to arrive at the highest possible score. While optimal alignment and scoring can be accomplished manually, the process is facilitated by the use of a computer-implemented alignment algorithm, e.g., gapped BLAST 2.0, described in Altschul et al, (1997) Nucleic Acids Res. 25:3389-3402, and made available to the public at the National Center for Biotechnology Information Website. Optimal alignments, including multiple alignments, can be prepared using, e.g., PSI-BLAST with no compositional adjustments.

[0214] With respect to amino acid sequence that is optimally aligned with a reference sequence (e.g., a wild-type, unmodified decarboxylase sequence), an amino acid residue “corresponds to” the position in the reference sequence with which the residue is paired in the alignment. The position is denoted by a number that sequentially identifies each amino acid in the reference sequence based on its position relative to the N-terminus. For example, in SEQ ID NO: 241, position 1 is M, position 2 is S, position 3 is E, etc. When a test sequence, (e.g., a corresponding modified variant of SEQ ID NO: 241) is optimally aligned to the reference sequence, a residue in the test sequence that aligns with the E at position 3 is said to “correspond to position 3” of SEQ ID NO: 241. Owing to deletions, insertion, truncations, fusions, etc., that must be taken into account when determining an optimal alignment, in general the amino acid residue number in a test sequence as determined by simply counting from the N-terminal will not necessarily be the same as the number of its corresponding position in the reference sequence. For example, in a case where there is a deletion in an aligned test sequence, there will be no amino acid that corresponds to a position in the reference sequence at the site of deletion. Where there is an insertion in an aligned reference sequence, that insertion will not correspond to any amino acid position in the reference sequence. In the case of truncations or fusions there can be stretches of amino acids in either the reference or aligned sequence that do not correspond to any amino acid in the corresponding sequence.

[0215] With respect to SEQ ID NO: 241, the highest similarity score achievable is 2903, which represents 100% of the similarity score for the reference sequence using the BLOSUM62 matrix, a gap existence penalty of 11, and a gap extension penalty of 1. Accordingly, similarity scores of 1452, 1742, 2032, 2322, 2613, and 2758 for variants of SEQ ID NO: 241 would represent 50%, 60%, 70%, 80%, 90%, and 95% of the similarity score for the reference sequence, i.e., SEQ ID NO; 241. Similarity scores generally allow for a greater number of relatively conservative substitutions than for example, a sequence identity determination, particularly when the substituted amino acids share similar chemical and structural characteristics. Accordingly, similarity score is a highly predictive tool for discriminating between functional and non-functional sequence variants.

[0216] In addition, as is understood by the skilled artisan, not all positions within an enzyme are created equal. Certain “permissive sites” are more likely to accommodate mutations without affecting activity or stability. In a sequence family such as the thiamin diphosphate-dependent decarboxylases, there are hundreds of relatively permissive sites. One method to identify permissive sites is by quantifying the extent to which each site has variable amino acids among a collection of homologs. A standard calculation to quantify this variability is to compute the sequence entropy for each site.

[0217] To accomplish this, 225 sequences corresponding to SEQ ID NOs: 1-214 and 241-251 were aligned using CLUSTAL 2.0.12, a standard, well-known software for multiple sequence alignment. These sequences vary in length. Accordingly, the multiple sequence alignment has a number of gaps. Typically, sequence identity is calculated by counting the number of matching amino acids after aligning two sequences, ignoring gaps in the alignment. To proceed, the analysis was limited to positions in the multiple sequence alignment where at least half of the sequences (>112) have an amino acid rather than a gap. Furthermore, for numbering simplicity, only sites for which S. cerevisiae PDC1 (SEQ ID NO: 241) has an amino acid rather than a gap were considered. This results in 553 aligned positions. For each of these aligned positions, the sequence entropy (FIG. 14) was calculated. First, the probability P of observing each amino acid variant found at this site was calculated. Then the sum of −P*ln(P) over all amino acid variants was computed. If the site is completely conserved (for example, the histidine amino acids found in the HH-motif common to all 225 sequences), the sequence entropy is 0. In contrast, if all 20 amino acids were found with equal probability, the sequence entropy would be 3.0.

[0218] Several positions within the multiple sequence alignment are quite diverse, with high sequence entropy. Of the 553 positions, 338 have sequence entropy exceeding a threshold of 1.0, 224 also exceed 1.5, 150 also exceed 1.8, and 98 also exceed 2.0. For example, the site for Thr104 from ScPDC1 has sequence entropy of 2.004. At this site, 12 amino acid variants are found, with the most common variants being Thr (74/225), Ser (53/225), Pro (32/225), Cys (28/225), Ala (19/225), and Gly 15/225).

[0219] As used herein, a permissive site exceeds a specified sequence entropy threshold using the code illustrated in FIG. 14. Using a threshold level of >1.0 for permissive sites, the following positions corresponding to S. cerevisiae PDC1 residues are relatively permissive sites within the multiple sequence alignment: 1, 2, 3, 4, 5, 7, 8, 11, 15, 16, 17, 19, 20, 21, 22, 32, 36, 38, 39, 40, 41, 42, 43, 44, 49, 64, 65, 67, 71, 82, 92, 96, 97, 101, 103, 104, 105, 106, 107, 108, 109, 111, 112, 113, 121, 123, 124, 126, 127, 129, 130, 131, 134, 136, 137, 138, 141, 142, 146, 147, 154, 155, 156, 157, 158, 159, 160, 166, 169, 172, 173, 174, 175, 176, 177, 178, 179, 180, 181, 182, 183, 184, 185, 186, 189, 190, 191, 192, 193, 194, 195, 196, 197, 198, 199, 200, 201, 202, 203, 204, 205, 206, 207, 209, 210, 211, 212, 213, 214, 215, 216, 220, 221, 222, 223, 225, 226, 227, 228, 229, 230, 232, 233, 234, 235, 236, 237, 238, 239, 240, 242, 244, 246, 247, 251, 252, 253, 255, 256, 258, 260, 262, 264, 266, 267, 269, 270, 271, 272, 273, 274, 275, 278, 281, 282, 284, 285, 287, 288, 289, 292, 293, 299, 300, 301, 302, 303, 304, 305, 306, 308, 309, 310, 311, 312, 313, 314, 315, 316, 317, 318, 319, 320, 321, 322, 323, 324, 325, 327, 328, 329, 331, 332, 334, 335, 336, 337, 338, 339, 340, 341, 342, 343, 344, 345, 346, 347, 348, 349, 350, 351, 352, 353, 354, 355, 356, 357, 358, 359, 360, 361, 362, 363, 364, 366, 368, 369, 370, 372, 373, 374, 375, 376, 377, 379, 380, 381, 383, 384, 385, 391, 392, 395, 396, 397, 398, 399, 402, 403, 404, 405, 406, 407, 408, 422, 423, 425, 427, 429, 434, 435, 438, 441, 447, 451, 454, 456, 457, 458, 460, 461, 462, 463, 465, 467, 469, 472, 479, 483, 484, 485, 486, 491, 492, 494, 496, 497, 500, 501, 503, 504, 505, 507, 508, 509, 510, 511, 513, 514, 515, 516, 517, 519, 520, 521, 522, 523, 525, 526, 527, 528, 529, 530, 531, 532, 533, 534, 535, 539, 540, 541, 542, 543, 545, 547, 548, 550, 551, 552, 553, 554, 555, 556, 557, 558, 559, 561, 562.

[0220] In contrast, sites below a specified sequence entropy threshold can be used to identify relatively non-permissive sites. Accordingly, as used herein, a non-permissive sitefalls below a specified threshold using the code illustrated in FIG. 14. Using a threshold level of <1.0 for non-permissive sites, the following positions corresponding to S. cerevisiae PDC1 residues are relatively non-permissive sites within the multiple sequence alignment: 6, 9, 10, 12, 13, 14, 18, 23, 24, 25, 26, 27, 28, 29, 30, 31, 33, 34, 35, 37, 45, 46, 47, 48, 50, 51, 52, 53, 54, 55, 56, 57, 58, 59, 60, 61, 62, 63, 66, 68, 69, 70, 72, 73, 74, 75, 76, 77, 78, 79, 80, 81, 83, 84, 85, 86, 87, 88, 89, 90, 91, 93, 94, 95, 98, 99, 100, 102, 110, 114, 115, 116, 117, 118, 119, 120, 122, 125, 128, 132, 133, 135, 139, 140, 143, 145, 148, 149, 150, 151, 152, 153, 161, 162, 163, 164, 165, 167, 168, 170, 171, 208, 217, 218, 219, 224, 231, 241, 243, 245, 248, 249, 250, 254, 257, 259, 261, 263, 265, 268, 276, 277, 279, 280, 283, 286, 290, 291, 294, 295, 296, 297, 298, 307, 326, 330, 333, 365, 367, 371, 378, 382, 386, 387, 388, 389, 390, 393, 394, 400, 401, 409, 410, 411, 412, 413, 414, 415, 416, 417, 418, 419, 420, 421, 424, 426, 428, 436, 437, 439, 440, 442, 443, 444, 445, 446, 448, 449, 450, 452, 453, 455, 459, 464, 466, 468, 470, 471, 473, 474, 475, 476, 477, 478, 480, 481, 482, 487, 488, 489, 490, 493, 495, 498, 499, 502, 512, 518, 536, 537, 538, 544, 546, 549, 560.

[0221] In certain embodiments, the threshold level may be set at 1.8. Using a threshold level of >1.8 for permissive sites, the following positions corresponding to S. cerevisiae PDC1 residues are relatively permissive sites within the multiple sequence alignment: 1, 2, 3, 15, 20, 42, 44, 103, 104, 105, 108, 109, 123, 126, 138, 146, 147, 154, 158, 166, 173, 174, 177, 178, 180, 181, 182, 183, 184, 185, 186, 189, 190, 191, 192, 194, 195, 198, 199, 201, 202, 203, 205, 206, 207, 209, 210, 213, 223, 228, 229, 230, 232, 233, 237, 239, 255, 258, 260, 264, 266, 269, 270, 271, 274, 275, 281, 300, 302, 303, 312, 313, 317, 319, 320, 322, 325, 327, 328, 331, 332, 334, 335, 336, 337, 338, 339, 340, 341, 342, 343, 344, 345, 347, 348, 349, 350, 351, 352, 353, 354, 355, 356, 359, 360, 361, 362, 363, 364, 368, 369, 372, 373, 376, 397, 399, 402, 405, 429, 435, 483, 484, 492, 497, 500, 504, 507, 508, 510, 513, 515, 516, 519, 523, 526, 527, 528, 529, 530, 532, 534, 543, 545, 547, 550, 551, 553, 557, 558, 562. Likewise, using a threshold level of <1.8 for non-permissive sites, the following positions corresponding to S. cerevisiae PDC1 residues are relatively non-permissive sites within the multiple sequence alignment: 4, 5, 6, 7, 8, 9, 10, 11, 12, 13, 14, 16, 17, 18, 19, 21, 22, 23, 24, 25, 26, 27, 28, 29, 30, 31, 32, 33, 34, 35, 36, 37, 38, 39, 40, 41, 43, 45, 46, 47, 48, 49, 50, 51, 52, 53, 54, 55, 56, 57, 58, 59, 60, 61, 62, 63, 64, 65, 66, 67, 68, 69, 70, 71, 72, 73, 74, 75, 76, 77, 78, 79, 80, 81, 82, 83, 84, 85, 86, 87, 88, 89, 90, 91, 92, 93, 94, 95, 96, 97, 98, 99, 100, 101, 102, 106, 107, 110, 111, 112, 113, 114, 115, 116, 117, 118, 119, 120, 121, 122, 124, 125, 127, 128, 129, 130, 131, 132, 133, 134, 135, 136, 137, 139, 140, 141, 142, 143, 145, 148, 149, 150, 151, 152, 153, 155, 156, 157, 159, 160, 161, 162, 163, 164, 165, 167, 168, 169, 170, 171, 172, 175, 176, 179, 193, 196, 197, 200, 204, 208, 211, 212, 214, 215, 216, 217, 218, 219, 220, 221, 222, 224, 225, 226, 227, 231, 234, 235, 236, 238, 240, 241, 242, 243, 244, 245, 246, 247, 248, 249, 250, 251, 252, 253, 254, 256, 257, 259, 261, 262, 263, 265, 267, 268, 272, 273, 276, 277, 278, 279, 280, 282, 283, 284, 285, 286, 287, 288, 289, 290, 291, 292, 293, 294, 295, 296, 297, 298, 299, 301, 304, 305, 306, 307, 308, 309, 310, 311, 314, 315, 316, 318, 321, 323, 324, 326, 329, 330, 333, 346, 357, 358, 365, 366, 367, 370, 371, 374, 375, 377, 378, 379, 380, 381, 382, 383, 384, 385, 386, 387, 388, 389, 390, 391, 392, 393, 394, 395, 396, 398, 400, 401, 403, 404, 406, 407, 408, 409, 410, 411, 412, 413, 414, 415, 416, 417, 418, 419, 420, 421, 422, 423, 424, 425, 426, 427, 428, 434, 436, 437, 438, 439, 440, 441, 442, 443, 444, 445, 446, 447, 448, 449, 450, 451, 452, 453, 454, 455, 456, 457, 458, 459, 460, 461, 462, 463, 464, 465, 466, 467, 468, 469, 470, 471, 472, 473, 474, 475, 476, 477, 478, 479, 480, 481, 482, 485, 486, 487, 488, 489, 490, 491, 493, 494, 495, 496, 498, 499, 501, 502, 503, 505, 509, 511, 512, 514, 517, 518, 520, 521, 522, 525, 531, 533, 535, 536, 537, 538, 539, 540, 541, 542, 544, 546, 548, 549, 552, 554, 555, 556, 559, 560, 561.

[0222] In certain embodiments, the threshold level may be set at 2.0. Using a threshold level of >2.0 for permissive sites, the following positions corresponding to S. cerevisiae PDC1 residues are relatively permissive sites within the multiple sequence alignment: 1, 2, 3, 15, 20, 42, 44, 104, 105, 108, 123, 126, 138, 147, 154, 158, 166, 173, 174, 177, 178, 180, 181, 184, 185, 186, 189, 190, 191, 192, 194, 195, 198, 202, 205, 209, 210, 223, 228, 229, 230, 232, 239, 255, 266, 271, 303, 313, 319, 320, 322, 325, 327, 331, 334, 335, 336, 338, 339, 340, 342, 343, 344, 345, 347, 348, 349, 350, 351, 352, 354, 355, 362, 364, 369, 372, 376, 402, 405, 484, 492, 500, 504, 508, 510, 515, 516, 523, 526, 527, 528, 529, 530, 543, 547, 550, 551, 562 Likewise, using a threshold level of <2.0 for non-permissive sites, the following positions corresponding to S. cerevisiae PDC1 residues are relatively non-permissive sites within the multiple sequence alignment: 4, 5, 6, 7, 8, 9, 10, 11, 12, 13, 14, 16, 17, 18, 19, 21, 22, 23, 24, 25, 26, 27, 28, 29, 30, 31, 32, 33, 34, 35, 36, 37, 38, 39, 40, 41, 43, 45, 46, 47, 48, 49, 50, 51, 52, 53, 54, 55, 56, 57, 58, 59, 60, 61, 62, 63, 64, 65, 66, 67, 68, 69, 70, 71, 72, 73, 74, 75, 76, 77, 78, 79, 80, 81, 82, 83, 84, 85, 86, 87, 88, 89, 90, 91, 92, 93, 94, 95, 96, 97, 98, 99, 100, 101, 102, 103, 106, 107, 109, 110, 111, 112, 113, 114, 115, 116, 117, 118, 119, 120, 121, 122, 124, 125, 127, 128, 129, 130, 131, 132, 133, 134, 135, 136, 137, 139, 140, 141, 142, 143, 145, 146, 148, 149, 150, 151, 152, 153, 155, 156, 157, 159, 160, 161, 162, 163, 164, 165, 167, 168, 169, 170, 171, 172, 175, 176, 179, 182, 183, 193, 196, 197, 199, 200, 201, 203, 204, 206, 207, 208, 211, 212, 213, 214, 215, 216, 217, 218, 219, 220, 221, 222, 224, 225, 226, 227, 231, 233, 234, 235, 236, 237, 238, 240, 241, 242, 243, 244, 245, 246, 247, 248, 249, 250, 251, 252, 253, 254, 256, 257, 258, 259, 260, 261, 262, 263, 264, 265, 267, 268, 269, 270, 272, 273, 274, 275, 276, 277, 278, 279, 280, 281, 282, 283, 284, 285, 286, 287, 288, 289, 290, 291, 292, 293, 294, 295, 296, 297, 298, 299, 300, 301, 302, 304, 305, 306, 307, 308, 309, 310, 311, 312, 314, 315, 316, 317, 318, 321, 323, 324, 326, 328, 329, 330, 332, 333, 337, 341, 346, 353, 356, 357, 358, 359, 360, 361, 363, 365, 366, 367, 368, 370, 371, 373, 374, 375, 377, 378, 379, 380, 381, 382, 383, 384, 385, 386, 387, 388, 389, 390, 391, 392, 393, 394, 395, 396, 397, 398, 399, 400, 401, 403, 404, 406, 407, 408, 409, 410, 411, 412, 413, 414, 415, 416, 417, 418, 419, 420, 421, 422, 423, 424, 425, 426, 427, 428, 429, 434, 435, 436, 437, 438, 439, 440, 441, 442, 443, 444, 445, 446, 447, 448, 449, 450, 451, 452, 453, 454, 455, 456, 457, 458, 459, 460, 461, 462, 463, 464, 465, 466, 467, 468, 469, 470, 471, 472, 473, 474, 475, 476, 477, 478, 479, 480, 481, 482, 483, 485, 486, 487, 488, 489, 490, 491, 493, 494, 495, 496, 497, 498, 499, 501, 502, 503, 505, 507, 509, 511, 512, 513, 514, 517, 518, 519, 520, 521, 522, 525, 531, 532, 533, 534, 535, 536, 537, 538, 539, 540, 541, 542, 544, 545, 546, 548, 549, 552, 553, 554, 555, 556, 557, 558, 559, 560, 561.

[0223] Accordingly, in some embodiments, the present application provides a nucleic acid molecule encoding a modified decarboxylase, wherein said modified decarboxylase is derived from a corresponding wild-type, unmodified decarboxylase, wherein the sequence of non-permissive sites within said modified decarboxylase is at least about 60%, at least about 70%, at least about 80%, or more preferably at least about 90% identical to the sequence of non-permissive sites within the corresponding wild-type, unmodified decarboxylase. In one embodiment, the threshold level for distinguishing between permissive and non-permissive sites using the code illustrated in FIG. 14 is 1.0. In certain other embodiments, the threshold level for distinguishing between permissive and non-permissive sites using the code illustrated in FIG. 14 is selected from 1.2, 1.4, 1.6, 1.8, and 2.0. In an exemplary embodiment, the modified decarboxylase enzyme is derived from a corresponding wild-type, unmodified decarboxylase selected from SEQ ID NOs: 1-214 and 241-251. In some embodiments, the corresponding wild-type, unmodified decarboxylase is obtained from a yeast microorganism. In a further embodiment, the corresponding wild-type, unmodified decarboxylase is obtained from a yeast microorganism classified into a genera selected from the group consisting of Saccharomyces, Kluyveromyces, Candida, Pichia, Issatchenkia, Debaryomyces, Hansenula, Pachysolen, Yarrowia, Schizosaccharomyces, Tricosporon, Rhodotorula, and Myxozyma. In another further embodiment, the corresponding wild-type, unmodified decarboxylase is obtained from a Saccharomyces yeast. In an exemplary embodiment, the corresponding wild-type, unmodified decarboxylase is obtained from Saccharomyces cerevisiae. In another exemplary embodiment, the corresponding wild-type, unmodified decarboxylase is PDC1 (SEQ ID NO: 241), PDC5 (SEQ ID NO: 242), or PDC6 (SEQ ID NO: 243) of S. cerevisiae.

[0224] Another aspect of the application relates to a recombinant microorganism comprising at least one nucleic acid molecule encoding a modified decarboxylase, wherein said decarboxylase has one or more modifications or mutations at positions corresponding to amino acids selected from: (a) aspartic acid 26 of the L. lactis KIVD (SEQ ID NO: 197); (b) histidine 112 of the L. lactis KIVD (SEQ ID NO: 197); (c) histidine 113 of the L. lactis KIVD (SEQ ID NO: 197); (d) glycine 402 of the L. lactis KIVD (SEQ ID NO: 197); and (e) glutamic acid 462 of the L. lactis KIVD (SEQ ID NO: 197). In an exemplary embodiment, the modified decarboxylase enzyme is derived from a corresponding unmodified decarboxylase that is at least about 65%, 70%, 75%, 80%, 85%, 90%, 91%, 92%, 93%, 94%, 95%, 96%, 97%, 98%, 99%, or 99.5% identical to a polypeptide selected from SEQ ID NOs 1-214.

[0225] Yet another aspect of the application relates to a recombinant microorganism comprising at least one nucleic acid molecule encoding a modified decarboxylase, wherein said decarboxylase has one or more modifications or mutations at positions corresponding to amino acids selected from: (a) serine 286 of the L. lactis KIVD (SEQ ID NO: 197); (b) glutamine 377 of the L. lactis KIVD (SEQ ID NO: 197); (c) phenylalanine 381 of the L. lactis KIVD (SEQ ID NO: 197); (d) valine 461 of the L. lactis KIVD (SEQ ID NO: 197); (e) isoleucine 465 of the L. lactis KIVD (SEQ ID NO: 197); (f) methionine 538 of the L. lactis KIVD (SEQ ID NO: 197); and (g) phenylalanine 542 of the L. lactis KIVD (SEQ ID NO: 197). In an exemplary embodiment, the modified decarboxylase enzyme is derived from a corresponding unmodified decarboxylase that is at least about 65%, 70%, 75%, 80%, 85%, 90%, 91%, 92%, 93%, 94%, 95%, 96%, 97%, 98%, 99%, or 99.5% identical to a polypeptide selected from SEQ ID NOs 1-214.

[0226] Yet another aspect of the application relates to a recombinant microorganism comprising at least one nucleic acid molecule encoding a modified decarboxylase, wherein said decarboxylase has one or more modifications or mutations at positions corresponding to amino acids selected from: (a) phenylalanine 305 of the F. novicida decarboxylase (SEQ ID NO: 198); (b) threonine 397 of the F. novicida decarboxylase (SEQ ID NO: 198); (c) serine 401 of the F. novicida decarboxylase (SEQ ID NO: 198); (d) isoleucine 481 of the F. novicida decarboxylase (SEQ ID NO: 198); (e) leucine 485 of the F. novicida decarboxylase (SEQ ID NO: 198); (f) phenylalanine 556 of the F. novicida decarboxylase (SEQ ID NO: 198); and (g) leucine 560 of the F. novicida decarboxylase (SEQ ID NO: 198). In an exemplary embodiment, the modified decarboxylase enzyme is derived from a corresponding unmodified decarboxylase that is at least about 65%, 70%, 75%, 80%, 85%, 90%, 91%, 92%, 93%, 94%, 95%, 96%, 97%, 98%, 99%, or 99.5% identical to a polypeptide selected from SEQ ID NOs 1-214.

[0227] Yet another aspect of the application relates to a recombinant microorganism comprising at least one nucleic acid molecule encoding a modified decarboxylase, wherein said decarboxylase has one or more modifications or mutations at positions corresponding to amino acids selected from: (a) phenylalanine 292 of the S. cerevisiae PDC1 (SEQ ID NO: 241); (b) threonine 388 of the S. cerevisiae PDC1 (SEQ ID NO: 241); (c) alanine 392 of the S. cerevisiae PDC1 (SEQ ID NO: 241); (d) serine 408 of the S. cerevisiae PDC1 (SEQ ID NO: 241); (e) valine 410 of the S. cerevisiae PDC1 (SEQ ID NO: 241); (f) isoleucine 476 of the S. cerevisiae PDC1 (SEQ ID NO: 241); (g) glutamine 552 of the S. cerevisiae PDC1 (SEQ ID NO: 241); and (h) threonine 556 of the S. cerevisiae PDC1 (SEQ ID NO: 241). In an exemplary embodiment, the modified decarboxylase enzyme is derived from a corresponding unmodified decarboxylase that is at least about 65%, 70%, 75%, 80%, 85%, 90%, 91%, 92%, 93%, 94%, 95%, 96%, 97%, 98%, 99%, or 99.5% identical to a wild-type pyruvate decarboxylase. In one embodiment, the wild-type, unmodified pyruvate decarboxylase is obtained from a yeast microorganism. In a further embodiment, the wild-type, unmodified pyruvate decarboxylase is obtained from a yeast microorganism classified into a genera selected from the group consisting of Saccharomyces, Kluyveromyces, Candida, Pichia, Issatchenkia, Debaryomyces, Hansenula, Pachysolen, Yarrowia, Schizosaccharomyces, Tricosporon, Rhodotorula, and Myxozyma. In another further embodiment, the wild-type, unmodified pyruvate decarboxylase is obtained from a Saccharomyces yeast. In an exemplary embodiment, the wild-type, unmodified pyruvate decarboxylase is obtained from Saccharomyces cerevisiae. In another exemplary embodiment, the wild-type, unmodified pyruvate decarboxylase is PDC1 (SEQ ID NO: 241), PDC5 (SEQ ID NO: 242), or PDC6 (SEQ ID NO: 243) of S. cerevisiae. In yet another exemplary embodiment, the wild-type, unmodified pyruvate decarboxylase is selected from SEQ ID NOs: 244-251. In additional embodiments, the recombinant microorganism comprises a deletion or disruption of one or more endogenous pyruvate decarboxylase gene(s). This reduces the cell's ability to produce ethanol, which is particularly desirable in cases in which a higher alcohol such as isobutanol is the desired product. If the host cell contains multiple PDC genes, it is especially preferred to delete or disrupt all of the PDC genes, although it is possible to delete fewer than all such PDC genes. PDC deletion can be accomplished using methods analogous to those described in commonly-owned U.S. Pat. No. 8,017,375.

[0228] In accordance with the invention, any number of mutations can be made to the decarboxylase enzymes, and in a preferred aspect, multiple mutations can be made to result in an increased ability to catalyze the conversion of alpha-ketoisovalerate to isobutyraldehyde with high specificity. Such mutations include point mutations, frame shift mutations, deletions, and insertions, with one or more (e.g., one, two, three, four, five, six, seven, eight, nine, ten or more, etc.) point mutations preferred.

### Recombinant Microorganisms Comprising One or More High Performance KIVDs

[0229] In addition to isobutanol producing metabolic pathways, a number of biosynthetic pathways use enzymes exhibiting keto-isovalerate decarboxylase (KIVD) activity to catalyze a reaction step, including pathways for the production of isobutanol, 1-propanol, 1-butanol, 2-methyl-1-butanol, 3-methyl-1-butanol, and 2-phenylethanol. A representative list of the engineered biosynthetic pathways utilizing enzymes exhibiting keto-isovalerate decarboxylase (KIVD) activity are described in Table 1.

TABLE 1
Biosynthetic Pathways Utilizing KIVD Activity.

| Biosynthetic Pathway | Reference^{a} |
|---|---|
| Isobutanol | US 2009/0226991 (Feldman et al.), US 2011/0020889 (Feldman et |
| | al.), and US 2010/0143997 (Buelter et al.), Atsumi et al., 2008, |
| | Nature 451: 86-89 |
| 1-Propanol | Atsumi et al., 2008, Nature 451: 86-89 |
| 1-Butanol | Atsumi et al., 2008, Nature 451: 86-89 |
| 2-Methyl-1-butanol | Atsumi et al., 2008, Nature 451: 86-89 |
| 3-Methyl-1-butanol | Atsumi et al., 2008, Nature 451: 86-89 |
| 2-Phenylethanol | Atsumi et al., 2008, Nature 451: 86-89 |

^{a}The contents of each of the references in this table are herein incorporated by reference in their entireties for all purposes.

[0230] Each of these biosynthetic pathways comprises a reaction step catalyzed by a 2-keto acid decarboxylase. Specifically, intermediates of the isobutanol, 1-propanol, 1-butanol, 2-methyl-1-butanol, 3-methyl-1-butanol, and 2-phenylethanol pathways are converted to further products by the action of an enzyme exhibiting keto-isovalerate decarboxylase (KIVD) activity—the intermediates are 2-ketoisovalerate, 2-ketobutyrate, 2-ketovalerate, 2-keto-3-methylvalerate, 2-keto-4-methylpentanoate, and phenylpyruvate, respectively. Therefore, the product yield from these biosynthetic pathways will in part depend upon the activity of the enzyme exhibiting keto-isovalerate decarboxylase (KIVD) activity.

[0231] As will be understood by one skilled in the art equipped with the present disclosure, the enzymes exhibiting keto-isovalerate decarboxylase (KIVD) activity described herein would have utility in any of the above-described pathways. Thus, in an additional aspect, the present application relates to a recombinant microorganism comprising a biosynthetic pathway requiring an enzyme with keto-isovalerate decarboxylase (KIVD) activity, wherein said recombinant microorganism comprises at least one nucleic acid molecule encoding a polypeptide with keto-isovalerate decarboxylase (KIVD) activity, wherein said polypeptide is at least about 65%, 70%, 75%, 80%, 85%, 90%, 91%, 92%, 93%, 94%, 95%, 96%, 97%, 98%, 99%, or 99.5% identical to a polypeptide selected from SEQ ID NOs 1-214. In a further aspect, the present application relates to a recombinant microorganism comprising a biosynthetic pathway requiring an enzyme with keto-isovalerate decarboxylase (KIVD) activity, wherein said recombinant microorganism comprises at least one nucleic acid molecule encoding a modified decarboxylase, wherein said decarboxylase has one or more modifications or mutations at positions corresponding to amino acids selected from: (a) aspartic acid 26 of the L. lactis KIVD (SEQ ID NO: 197); (b) histidine 112 of the L. lactis KIVD (SEQ ID NO: 197); (c) histidine 113 of the L. lactis KIVD (SEQ ID NO: 197); (d) glycine 402 of the L. lactis KIVD (SEQ ID NO: 197); and (e) glutamic acid 462 of the L. lactis KIVD (SEQ ID NO: 197). In an exemplary embodiment, the modified decarboxylase enzyme is derived from a corresponding unmodified decarboxylase that is at least about 65%, 70%, 75%, 80%, 85%, 90%, 91%, 92%, 93%, 94%, 95%, 96%, 97%, 98%, 99%, or 99.5% identical to a polypeptide selected from SEQ ID NOs 1-214.

[0232] In another further aspect, the present application relates to a recombinant microorganism comprising a biosynthetic pathway requiring an enzyme with keto-isovalerate decarboxylase (KIVD) activity, wherein said recombinant microorganism comprises at least one nucleic acid molecule encoding a modified decarboxylase, wherein said decarboxylase has one or more modifications or mutations at positions corresponding to amino acids selected from: (a) serine 286 of the L. lactis KIVD (SEQ ID NO: 197); (b) glutamine 377 of the L. lactis KIVD (SEQ ID NO: 197); (c) phenylalanine 381 of the L. lactis KIVD (SEQ ID NO: 197); (d) valine 461 of the L. lactis KIVD (SEQ ID NO: 197); (e) isoleucine 465 of the L. lactis KIVD (SEQ ID NO: 197); (f) methionine 538 of the L. lactis KIVD (SEQ ID NO: 197); and (g) phenylalanine 542 of the L. lactis KIVD (SEQ ID NO: 197). In an exemplary embodiment, the modified decarboxylase enzyme is derived from a corresponding unmodified decarboxylase that is at least about 65%, 70%, 75%, 80%, 85%, 90%, 91%, 92%, 93%, 94%, 95%, 96%, 97%, 98%, 99%, or 99.5% identical to a polypeptide selected from SEQ ID NOs 1-214.

[0233] In yet another further aspect, the present application relates to a recombinant microorganism comprising a biosynthetic pathway requiring an enzyme with keto-isovalerate decarboxylase (KIVD) activity, wherein said recombinant microorganism comprises at least one nucleic acid molecule encoding a modified decarboxylase, wherein said decarboxylase has one or more modifications or mutations at positions corresponding to amino acids selected from: (a) phenylalanine 305 of the F. novicida decarboxylase (SEQ ID NO: 198); (b) threonine 397 of the F. novicida decarboxylase (SEQ ID NO: 198); (c) serine 401 of the F. novicida decarboxylase (SEQ ID NO: 198); (d) isoleucine 481 of the F. novicida decarboxylase (SEQ ID NO: 198); (e) leucine 485 of the F. novicida decarboxylase (SEQ ID NO: 198); (f) phenylalanine 556 of the F. novicida decarboxylase (SEQ ID NO: 198); and (g) leucine 560 of the F. novicida decarboxylase (SEQ ID NO: 198). In an exemplary embodiment, the modified decarboxylase enzyme is derived from a corresponding unmodified decarboxylase that is at least about 65%, 70%, 75%, 80%, 85%, 90%, 91%, 92%, 93%, 94%, 95%, 96%, 97%, 98%, 99%, or 99.5% identical to a polypeptide selected from SEQ ID NOs 1-214.

[0234] In yet another further aspect, the present application relates to a recombinant microorganism comprising a biosynthetic pathway requiring an enzyme with keto-isovalerate decarboxylase (KIVD) activity, wherein said recombinant microorganism comprises at least one nucleic acid molecule encoding a modified decarboxylase, wherein said decarboxylase has one or more modifications or mutations at positions corresponding to amino acids selected from: (a) phenylalanine 292 of the S. cerevisiae PDC1 (SEQ ID NO: 241); (b) threonine 388 of the S. cerevisiae PDC1 (SEQ ID NO: 241); (c) alanine 392 of the S. cerevisiae PDC1 (SEQ ID NO: 241); (d) serine 408 of the S. cerevisiae PDC1 (SEQ ID NO: 241); (e) valine 410 of the S. cerevisiae PDC1 (SEQ ID NO: 241); (f) isoleucine 476 of the S. cerevisiae PDC1 (SEQ ID NO: 241); (g) glutamine 552 of the S. cerevisiae PDC1 (SEQ ID NO: 241); and (h) threonine 556 of the S. cerevisiae PDC1 (SEQ ID NO: 241). In an exemplary embodiment, the modified decarboxylase enzyme is derived from a corresponding unmodified decarboxylase that is at least about 65%, 70%, 75%, 80%, 85%, 90%, 91%, 92%, 93%, 94%, 95%, 96%, 97%, 98%, 99%, or 99.5% identical to a wild-type pyruvate decarboxylase. In one embodiment, the wild-type, unmodified pyruvate decarboxylase is obtained from a yeast microorganism. In a further embodiment, the wild-type, unmodified pyruvate decarboxylase is obtained from a yeast microorganism classified into a genera selected from the group consisting of Saccharomyces, Kluyveromyces, Candida, Pichia, Issatchenkia, Debaryomyces, Hansenula, Pachysolen, Yarrowia, Schizosaccharomyces, Tricosporon, Rhodotorula, and Myxozyma. In another further embodiment, the wild-type, unmodified pyruvate decarboxylase is obtained from a Saccharomyces yeast. In an exemplary embodiment, the wild-type, unmodified pyruvate decarboxylase is obtained from Saccharomyces cerevisiae. In another exemplary embodiment, the wild-type, unmodified pyruvate decarboxylase is PDC1 (SEQ ID NO: 241), PDC5 (SEQ ID NO: 242), or PDC6 (SEQ ID NO: 243) of S. cerevisiae. In yet another exemplary embodiment, the wild-type, unmodified pyruvate decarboxylase is selected from SEQ ID NOs: 244-251. In additional embodiments, the recombinant microorganism comprises a deletion or disruption of one or more endogenous pyruvate decarboxylase gene(s).

[0235] As used herein, a biosynthetic pathway requiring an enzyme with keto-isovalerate decarboxylase (KIVD) activity refers to any metabolic pathway which utilizes an enzyme with keto-isovalerate decarboxylase (KIVD) activity to convert a substrate to product conversion, e.g., starting with substrates such as 2-ketoisovalerate, 2-ketobutyrate, 2-ketovalerate, 2-keto-3-methylvalerate, 2-keto-4-methylpentanoate, and phenylpyruvate. Examples of biosynthetic pathway requiring an enzyme with keto-isovalerate decarboxylase (KIVD) activity include, but are not limited to, isobutanol, 1-propanol, 1-butanol, 2-methyl-1-butanl, 3-methyl-1-butanol, and 2-phenylethanol metabolic pathways. In an exemplary embodiment, the biosynthetic pathway requiring an enzyme with keto-isovalerate decarboxylase (KIVD) activity is an isobutanol-producing metabolic pathway. The metabolic pathway may naturally occur in a microorganism or arise from the introduction of one or more heterologous polynucleotides through genetic engineering. In an exemplary embodiment, the recombinant microorganisms expressing the biosynthetic pathway requiring an enzyme with keto-isovalerate decarboxylase (KIVD) activity are yeast cells.

### The Microorganism in General

[0236] As described herein, the recombinant microorganisms of the present invention can express a plurality of heterologous and/or native enzymes involved in pathways for the production of a beneficial metabolite such as isobutanol.

[0237] As described herein, “engineered” or “modified” microorganisms are produced via the introduction of genetic material into a host or parental microorganism of choice and/or by modification of the expression of native genes, thereby modifying or altering the cellular physiology and biochemistry of the microorganism. Through the introduction of genetic material and/or the modification of the expression of native genes the parental microorganism acquires new properties, e.g., the ability to produce a new, or greater quantities of, an intracellular and/or extracellular metabolite. As described herein, the introduction of genetic material into and/or the modification of the expression of native genes in a parental microorganism results in a new or modified ability to produce beneficial metabolites such as isobutanol from a suitable carbon source. The genetic material introduced into and/or the genes modified for expression in the parental microorganism contains gene(s), or parts of genes, coding for one or more of the enzymes involved in a biosynthetic pathway for the production of isobutanol and may also include additional elements for the expression and/or regulation of expression of these genes, e.g., promoter sequences.

[0238] In addition to the introduction of a genetic material into a host or parental microorganism, an engineered or modified microorganism can also include the alteration, disruption, deletion or knocking-out of a gene or polynucleotide to alter the cellular physiology and biochemistry of the microorganism. Through the alteration, disruption, deletion or knocking-out of a gene or polynucleotide, the microorganism acquires new or improved properties (e.g., the ability to produce a new metabolite or greater quantities of an intracellular metabolite, to improve the flux of a metabolite down a desired pathway, and/or to reduce the production of by-products).

[0239] Recombinant microorganisms provided herein may also produce metabolites in quantities not available in the parental microorganism. A “metabolite” refers to any substance produced by metabolism or a substance necessary for or taking part in a particular metabolic process. A metabolite can be an organic compound that is a starting material (e.g., glucose or pyruvate), an intermediate (e.g., 2-ketoisovalerate), or an end product (e.g., isobutanol) of metabolism. Metabolites can be used to construct more complex molecules, or they can be broken down into simpler ones. Intermediate metabolites may be synthesized from other metabolites, perhaps used to make more complex substances, or broken down into simpler compounds, often with the release of chemical energy.

[0240] The disclosure identifies specific genes useful in the methods, compositions and organisms of the disclosure; however it will be recognized that absolute identity to such genes is not necessary. For example, changes in a particular gene or polynucleotide comprising a sequence encoding a polypeptide or enzyme can be performed and screened for activity. Typically such changes comprise conservative mutations and silent mutations. Such modified or mutated polynucleotides and polypeptides can be screened for expression of a functional enzyme using methods known in the art.

[0241] Due to the inherent degeneracy of the genetic code, other polynucleotides which encode substantially the same or functionally equivalent polypeptides can also be used to clone and express the polynucleotides encoding such enzymes.

[0242] As will be understood by those of skill in the art, it can be advantageous to modify a coding sequence to enhance its expression in a particular host. The genetic code is redundant with 64 possible codons, but most organisms typically use a subset of these codons. The codons that are utilized most often in a species are called optimal codons, and those not utilized very often are classified as rare or low-usage codons. Codons can be substituted to reflect the preferred codon usage of the host, in a process sometimes called “codon optimization” or “controlling for species codon bias.”

[0243] Optimized coding sequences containing codons preferred by a particular prokaryotic or eukaryotic host (Murray et al., 1989, Nucl Acids Res. 17: 477-508) can be prepared, for example, to increase the rate of translation or to produce recombinant RNA transcripts having desirable properties, such as a longer half-life, as compared with transcripts produced from a non-optimized sequence. Translation stop codons can also be modified to reflect host preference. For example, typical stop codons for S. cerevisiae and mammals are UAA and UGA, respectively. The typical stop codon for monocotyledonous plants is UGA, whereas insects and E. coli commonly use UAA as the stop codon (Dalphin et al., 1996, Nucl Acids Res. 24: 216-8).

[0244] Those of skill in the art will recognize that, due to the degenerate nature of the genetic code, a variety of DNA compounds differing in their nucleotide sequences can be used to encode a given enzyme of the disclosure. The native DNA sequence encoding the biosynthetic enzymes described above are referenced herein merely to illustrate an embodiment of the disclosure, and the disclosure includes DNA compounds of any sequence that encode the amino acid sequences of the polypeptides and proteins of the enzymes utilized in the methods of the disclosure. In similar fashion, a polypeptide can typically tolerate one or more amino acid substitutions, deletions, and insertions in its amino acid sequence without loss or significant loss of a desired activity. The disclosure includes such polypeptides with different amino acid sequences than the specific proteins described herein so long as the modified or variant polypeptides have the enzymatic anabolic or catabolic activity of the reference polypeptide. Furthermore, the amino acid sequences encoded by the DNA sequences shown herein merely illustrate embodiments of the disclosure.

[0245] In addition, homologs of enzymes useful for generating metabolites are encompassed by the microorganisms and methods provided herein.

[0246] As used herein, two proteins (or a region of the proteins) are substantially homologous when the amino acid sequences have at least about 30%, 40%, 50% 60%, 65%, 70%, 75%, 80%, 85%, 90%, 91%, 92%, 93%, 94%, 95%, 96%, 97%, 98%, or 99% identity. To determine the percent identity of two amino acid sequences, or of two nucleic acid sequences, the sequences are aligned for optimal comparison purposes (e.g., gaps can be introduced in one or both of a first and a second amino acid or nucleic acid sequence for optimal alignment and non-homologous sequences can be disregarded for comparison purposes). In one embodiment, the length of a reference sequence aligned for comparison purposes is at least 30%, typically at least 40%, more typically at least 50%, even more typically at least 60%, and even more typically at least 70%, 80%, 90%, 100% of the length of the reference sequence. The amino acid residues or nucleotides at corresponding amino acid positions or nucleotide positions are then compared. When a position in the first sequence is occupied by the same amino acid residue or nucleotide as the corresponding position in the second sequence, then the molecules are identical at that position (as used herein amino acid or nucleic acid “identity” is equivalent to amino acid or nucleic acid “homology”). The percent identity between the two sequences is a function of the number of identical positions shared by the sequences, taking into account the number of gaps, and the length of each gap, which need to be introduced for optimal alignment of the two sequences.

[0247] When “homologous” is used in reference to proteins or peptides, it is recognized that residue positions that are not identical often differ by conservative amino acid substitutions. A “conservative amino acid substitution” is one in which an amino acid residue is substituted by another amino acid residue having a side chain (R group) with similar chemical properties (e.g., charge or hydrophobicity). In general, a conservative amino acid substitution will not substantially change the functional properties of a protein. In cases where two or more amino acid sequences differ from each other by conservative substitutions, the percent sequence identity or degree of homology may be adjusted upwards to correct for the conservative nature of the substitution. Means for making this adjustment are well known to those of skill in the art (See, e.g., Pearson W. R., 1994, Methods in Mol Biol 25: 365-89).

[0248] The following six groups each contain amino acids that are conservative substitutions for one another: 1) Serine (S), Threonine (T); 2) Aspartic Acid (D), Glutamic Acid (E); 3) Asparagine (N), Glutamine (Q); 4) Arginine (R), Lysine (K); 5) Isoleucine (I), Leucine (L), Alanine (A), Valine (V), and 6) Phenylalanine (F), Tyrosine (Y), Tryptophan (W).

[0249] Sequence homology for polypeptides, which is also referred to as percent sequence identity, is typically measured using sequence analysis software. See commonly owned and co-pending application US 2009/0226991. A typical algorithm used comparing a molecule sequence to a database containing a large number of sequences from different organisms is the computer program BLAST. When searching a database containing sequences from a large number of different organisms, it is typical to compare amino acid sequences. Database searching using amino acid sequences can be measured by algorithms described in commonly owned U.S. Pat. No. 8,017,375.

[0250] It is understood that a range of microorganisms can be modified to include an isobutanol producing metabolic pathway suitable for the production of isobutanol. In various embodiments, the microorganisms may be selected from yeast microorganisms. Yeast microorganisms for the production of isobutanol may be selected based on certain characteristics:

[0251] One characteristic may include the property that the microorganism is selected to convert various carbon sources into isobutanol. The term “carbon source” generally refers to a substance suitable to be used as a source of carbon for prokaryotic or eukaryotic cell growth. Examples of suitable carbon sources are described in commonly owned U.S. Pat. No. 8,017,375. Accordingly, in one embodiment, the recombinant microorganism herein disclosed can convert a variety of carbon sources to products, including but not limited to glucose, galactose, mannose, xylose, arabinose, lactose, sucrose, CO₂, and mixtures thereof.

[0252] The recombinant microorganism may thus further include a pathway for the production of isobutanol from five-carbon (pentose) sugars including xylose. Most yeast species metabolize xylose via a complex route, in which xylose is first reduced to xylitol via a xylose reductase (XR) enzyme. The xylitol is then oxidized to xylulose via a xylitol dehydrogenase (XDH) enzyme. The xylulose is then phosphorylated via a xylulokinase (XK) enzyme. This pathway operates inefficiently in yeast species because it introduces a redox imbalance in the cell. The xylose-to-xylitol step uses primarily NADPH as a cofactor (generating NADP+), whereas the xylitol-to-xylulose step uses NAD+ as a cofactor (generating NADH). Other processes must operate to restore the redox imbalance within the cell. This often means that the organism cannot grow anaerobically on xylose or other pentose sugars. Accordingly, a yeast species that can efficiently ferment xylose and other pentose sugars into a desired fermentation product is therefore very desirable.

[0253] Thus, in one aspect, the recombinant microorganism is engineered to express a functional exogenous xylose isomerase. Exogenous xylose isomerases (XI) functional in yeast are known in the art. See, e.g., Rajgarhia et al., U.S. Pat. No. 7,943,366, which is herein incorporated by reference in its entirety. In an embodiment according to this aspect, the exogenous XI gene is operatively linked to promoter and terminator sequences that are functional in the yeast cell. In a preferred embodiment, the recombinant microorganism further has a deletion or disruption of a native gene that encodes for an enzyme (e.g., XR and/or XDH) that catalyzes the conversion of xylose to xylitol. In a further preferred embodiment, the recombinant microorganism also contains a functional, exogenous xylulokinase (XK) gene operatively linked to promoter and terminator sequences that are functional in the yeast cell. In one embodiment, the xylulokinase (XK) gene is overexpressed.

[0254] In one embodiment, the yeast microorganism has reduced or no pyruvate decarboxylase (PDC) activity. PDC catalyzes the decarboxylation of pyruvate to acetaldehyde, which is then reduced to ethanol by ADH via an oxidation of NADH to NAD+. Ethanol production is the main pathway to oxidize the NADH from glycolysis. Deletion, disruption, or mutation of this pathway increases the pyruvate and the reducing equivalents (NADH) available for a biosynthetic pathway which uses pyruvate as the starting material and/or as an intermediate. Accordingly, deletion, disruption, or mutation of one or more genes encoding for pyruvate decarboxylase and/or a positive transcriptional regulator thereof can further increase the yield of the desired pyruvate-derived metabolite (e.g., isobutanol). In one embodiment, said pyruvate decarboxylase gene targeted for disruption, deletion, or mutation is selected from the group consisting of PDC1, PDC5, and PDC6, or homologs or variants thereof. In another embodiment, all three of PDC1, PDC5, and PDC6 are targeted for disruption, deletion, or mutation. In yet another embodiment, a positive transcriptional regulator of the PDC1, PDC5, and/or PDC6 is targeted for disruption, deletion or mutation. In one embodiment, said positive transcriptional regulator is PDC2, or homologs or variants thereof.

[0255] As is understood by those skilled in the art, there are several additional mechanisms available for reducing or disrupting the activity of a protein encoded by PDC1, PDC5, PDC6, and/or PDC2, including, but not limited to, the use of a regulated promoter, use of a weak constitutive promoter, disruption of one of the two copies of the gene in a diploid yeast, disruption of both copies of the gene in a diploid yeast, expression of an anti-sense nucleic acid, expression of an siRNA, over expression of a negative regulator of the endogenous promoter, alteration of the activity of an endogenous or heterologous gene, use of a heterologous gene with lower specific activity, the like or combinations thereof. Yeast strains with reduced PDC activity are described in commonly owned U.S. Pat. No. 8,017,375, as well as commonly owned and co-pending US Patent Publication No. 2011/0183392.

[0256] In another embodiment, the microorganism has reduced glycerol-3-phosphate dehydrogenase (GPD) activity. GPD catalyzes the reduction of dihydroxyacetone phosphate (DHAP) to glycerol-3-phosphate (G3P) via the oxidation of NADH to NAD+. Glycerol is then produced from G3P by Glycerol-3-phosphatase (GPP). Glycerol production is a secondary pathway to oxidize excess NADH from glycolysis. Reduction or elimination of this pathway would increase the pyruvate and reducing equivalents (NADH) available for the production of a pyruvate-derived metabolite (e.g., isobutanol). Thus, disruption, deletion, or mutation of the genes encoding for glycerol-3-phosphate dehydrogenases can further increase the yield of the desired metabolite (e.g., isobutanol). Yeast strains with reduced GPD activity are described in commonly owned and co-pending US Patent Publication Nos. 2011/0020889 and 2011/0183392.

[0257] In yet another embodiment, the microorganism has reduced 3-keto acid reductase (3-KAR) activity. 3-KARs catalyze the conversion of 3-keto acids (e.g., acetolactate) to 3-hydroxyacids (e.g., DH2 MB). Yeast strains with reduced 3-KAR activity are described in commonly owned U.S. Pat. Nos. 8,133,715, 8,153,415, and 8,158,404, which are herein incorporated by reference in their entireties.

[0258] In yet another embodiment, the microorganism has reduced aldehyde dehydrogenase (ALDH) activity. Aldehyde dehydrogenases catalyze the conversion of aldehydes (e.g., isobutyraldehyde) to acid by-products (e.g., isobutyrate). Yeast strains with reduced ALDH activity are described in commonly owned U.S. Pat. Nos. 8,133,715, 8,153,415, and 8,158,404, which are herein incorporated by reference in their entireties.

[0259] In one embodiment, the yeast microorganisms may be selected from the “Saccharomyces Yeast Clade”, as described in commonly owned U.S. Pat. No. 8,017,375.

[0260] The term “Saccharomyces sensu stricto” taxonomy group is a cluster of yeast species that are highly related to S. cerevisiae (Rainieri et al., 2003, J. Biosci Bioengin 96: 1-9). Saccharomyces sensu stricto yeast species include but are not limited to S. cerevisiae, S. kudriavzevii, S. mikatae, S. bayanus, S. uvarum, S. carocanis and hybrids derived from these species (Masneuf et al., 1998, Yeast 7: 61-72).

[0261] An ancient whole genome duplication (WGD) event occurred during the evolution of the hemiascomycete yeast and was discovered using comparative genomic tools (Kellis et al., 2004, Nature 428: 617-24; Dujon et al., 2004, Nature 430:35-44; Langkjaer et al., 2003, Nature 428: 848-52; Wolfe et al., 1997, Nature 387: 708-13). Using this major evolutionary event, yeast can be divided into species that diverged from a common ancestor following the WGD event (termed “post-WGD yeast” herein) and species that diverged from the yeast lineage prior to the WGD event (termed “pre-WGD yeast” herein).

[0262] Accordingly, in one embodiment, the yeast microorganism may be selected from a post-WGD yeast genus, including but not limited to Saccharomyces and Candida. The favored post-WGD yeast species include: S. cerevisiae, S. uvarum, S. bayanus, S. paradoxus, S. castelli, and C. glabrata.

[0263] In another embodiment, the yeast microorganism may be selected from a pre-whole genome duplication (pre-WGD) yeast genus including but not limited to Saccharomyces, Kluyveromyces, Candida, Pichia, Issatchenkia, Debaryomyces, Hansenula, Yarrowia and, Schizosaccharomyces. Representative pre-WGD yeast species include: S. kluyveri, K. thermotolerans, K. marxianus, K. waltii, K. lactis, C. tropicalis, P. pastoris, P. anomala, P. stipitis, I. orientalis, I. occidentalis, I. scutulata, D. hansenii, H. anomala, Y. lipolytica, and S. pombe.

[0264] A yeast microorganism may be either Crabtree-negative or Crabtree-positive as described in described in commonly owned U.S. Pat. No. 8,017,375. In one embodiment the yeast microorganism may be selected from yeast with a Crabtree-negative phenotype including but not limited to the following genera: Saccharomyces, Kluyveromyces, Pichia, Issatchenkia, Hansenula, and Candida. Crabtree-negative species include but are not limited to: S. kluyveri, K. lactis, K. marxianus, P. anomala, P. stipitis, I. orientalis, I. occidentalis, I. scutulata, H. anomala, and C. utills. In another embodiment, the yeast microorganism may be selected from yeast with a Crabtree-positive phenotype, including but not limited to Saccharomyces, Kluyveromyces, Zygosaccharomyces, Debaryomyces, Pichia and Schizosaccharomyces. Crabtree-positive yeast species include but are not limited to: S. cerevisiae, S. uvarum, S. bayanus, S. paradoxus, S. castelli, K. thermotolerans, C. glabrata, Z. bailli, Z. rouxii, D. hansenii, P. pastorius, and S. pombe.

[0265] Another characteristic may include the property that the microorganism is that it is non-fermenting. In other words, it cannot metabolize a carbon source anaerobically while the yeast is able to metabolize a carbon source in the presence of oxygen. Nonfermenting yeast refers to both naturally occurring yeasts as well as genetically modified yeast. During anaerobic fermentation with fermentative yeast, the main pathway to oxidize the NADH from glycolysis is through the production of ethanol. Ethanol is produced by alcohol dehydrogenase (ADH) via the reduction of acetaldehyde, which is generated from pyruvate by pyruvate decarboxylase (PDC). In one embodiment, a fermentative yeast can be engineered to be non-fermentative by the reduction or elimination of the native PDC activity. Thus, most of the pyruvate produced by glycolysis is not consumed by PDC and is available for the isobutanol pathway. Deletion of this pathway increases the pyruvate and the reducing equivalents available for the biosynthetic pathway. Fermentative pathways contribute to low yield and low productivity of pyruvate-derived metabolites such as isobutanol. Accordingly, deletion of one or more PDC genes may increase yield and productivity of a desired metabolite (e.g., isobutanol).

[0266] In some embodiments, the recombinant microorganisms may be microorganisms that are non-fermenting yeast microorganisms, including, but not limited to those, classified into a genera selected from the group consisting of Tricosporon, Rhodotorula, Myxozyma, or Candida. In a specific embodiment, the non-fermenting yeast is C. xestobii.

[0267] Yeast microorganisms within the scope of the invention may have reduced enzymatic activity such as reduced 3-KAR, ALDH, PDC, or GPD activity. The term “reduced” as used herein with respect to a particular polypeptide activity refers to a lower level of polypeptide activity than that measured in a comparable yeast cell of the same species. The term reduced also refers to the elimination of polypeptide activity as compared to a comparable yeast cell of the same species. Thus, yeast cells lacking activity for an endogenous 3-KAR, ALDH, PDC, or GPD are considered to have reduced activity for 3-KAR, ALDH, PDC, or GPD since most, if not all, comparable yeast strains have at least some activity for 3-KAR, ALDH, PDC, or GPD. Such reduced 3-KAR, ALDH, PDC, or GPD activities can be the result of lower 3-KAR, ALDH, PDC, or GPD concentration (e.g., via reduced expression), lower specific activity of the 3-KAR, ALDH, PDC, or GPD, or a combination thereof. Many different methods can be used to make yeast having reduced 3-KAR, ALDH, PDC, or GPD activity. For example, a yeast cell can be engineered to have a disrupted 3-KAR-, ALDH-, PDC-, or GPD-encoding locus using common mutagenesis or knock-out technology. See, e.g., Methods in Yeast Genetics (1997 edition), Adams, Gottschling, Kaiser, and Stems, Cold Spring Harbor Press (1998). In addition, a yeast cell can be engineered to partially or completely remove the coding sequence for a particular 3-KAR, ALDH, PDC, or GPD. Furthermore, the promoter sequence and/or associated regulatory elements can be mutated, disrupted, or deleted to reduce the expression of a 3-KAR, ALDH, PDC, or GPD. Moreover, certain point-mutation(s) can be introduced which results in a 3-KAR, ALDH, PDC, or GPD with reduced activity. Also included within the scope of this invention are yeast strains which when found in nature, are substantially free of one or more 3-KAR, ALDH, PDC, or GPD activities.

[0268] Alternatively, antisense technology can be used to reduce 3-KAR, ALDH, PDC, or GPD activity. For example, yeasts can be engineered to contain a cDNA that encodes an antisense molecule that prevents a 3-KAR, ALDH, PDC, or GPD from being made. The term “antisense molecule” as used herein encompasses any nucleic acid molecule that contains sequences that correspond to the coding strand of an endogenous polypeptide. An antisense molecule also can have flanking sequences (e.g., regulatory sequences). Thus antisense molecules can be ribozymes or antisense oligonucleotides. A ribozyme can have any general structure including, without limitation, hairpin, hammerhead, or axhead structures, provided the molecule cleaves RNA.

[0269] In alternative embodiments, the recombinant microorganisms may be derived from bacterial microorganisms. In various embodiments the recombinant microorganism may be selected from a genus of Citrobacter, Corynebacterium, Lactobacillus, Lactococcus, Salmonella, Enterobacter, Enterococcus, Erwinia, Pantoea, Morganella, Pectobacterium, Proteus, Serratia, Shigella, and Klebsiella. In one specific embodiment, the recombinant microorganism is a lactic acid bacteria such as, for example, a microorganism derived from the Lactobacillus or Lactococcus genus.

### General Methods

[0270] Methods for the identification of homologous enzymes exhibiting KIVD activity, as well as methods for gene insertion, gene deletion, and gene overexpression may be found in commonly-owned U.S. Pat. Nos. 8,017,375, 8,017,376, 8,071,358, 8,097,440, 8,133,175, 8,153,415, 8,158,404, and 8,232,089, each of which is herein incorporated by reference in its entirety for all purposes.

### Methods of Using Recombinant Microorganisms for Isobutanol Production

[0271] In one aspect, the present application provides methods of producing a desired metabolite using a recombinant described herein. In one embodiment, the recombinant microorganism comprises a biosynthetic pathway requiring an enzyme with keto-isovalerate decarboxylase (KIVD) activity, wherein said recombinant microorganism comprises at least one nucleic acid molecule encoding a polypeptide with keto-isovalerate decarboxylase (KIVD) activity, wherein said polypeptide is at least about 65%, 70%, 75%, 80%, 85%, 90%, 91%, 92%, 93%, 94%, 95%, 96%, 97%, 98%, 99%, or 99.5% identical to a polypeptide selected from SEQ ID NOs 1-214. In another embodiment, the recombinant microorganism comprises a biosynthetic pathway requiring an enzyme with keto-isovalerate decarboxylase (KIVD) activity, wherein said recombinant microorganism comprises at least one nucleic acid molecule encoding a modified decarboxylase, wherein said decarboxylase has one or more modifications or mutations at positions corresponding to amino acids selected from: (a) aspartic acid 26 of the L. lactis KIVD (SEQ ID NO: 197); (b) histidine 112 of the L. lactis KIVD (SEQ ID NO: 197); (c) histidine 113 of the L. lactis KIVD (SEQ ID NO: 197); (d) glycine 402 of the L. lactis KIVD (SEQ ID NO: 197); and (e) glutamic acid 462 of the L. lactis KIVD (SEQ ID NO: 197). In an exemplary embodiment, the modified decarboxylase enzyme is derived from a corresponding unmodified decarboxylase that is at least about 65%, 70%, 75%, 80%, 85%, 90%, 91%, 92%, 93%, 94%, 95%, 96%, 97%, 98%, 99%, or 99.5% identical to a polypeptide selected from SEQ ID NOs 1-214. In yet another embodiment, the recombinant microorganism comprises a biosynthetic pathway requiring an enzyme with keto-isovalerate decarboxylase (KIVD) activity, wherein said recombinant microorganism comprises at least one nucleic acid molecule encoding a modified decarboxylase, wherein said decarboxylase has one or more modifications or mutations at positions corresponding to amino acids selected from: (a) serine 286 of the L. lactis KIVD (SEQ ID NO: 197); (b) glutamine 377 of the L. lactis KIVD (SEQ ID NO: 197); (c) phenylalanine 381 of the L. lactis KIVD (SEQ ID NO: 197); (d) valine 461 of the L. lactis KIVD (SEQ ID NO: 197); (e) isoleucine 465 of the L. lactis KIVD (SEQ ID NO: 197); (f) methionine 538 of the L. lactis KIVD (SEQ ID NO: 197); and (g) phenylalanine 542 of the L. lactis KIVD (SEQ ID NO: 197). In an exemplary embodiment, the modified decarboxylase enzyme is derived from a corresponding unmodified decarboxylase that is at least about 65%, 70%, 75%, 80%, 85%, 90%, 91%, 92%, 93%, 94%, 95%, 96%, 97%, 98%, 99%, or 99.5% identical to a polypeptide selected from SEQ ID NOs 1-214. In yet another embodiment, the recombinant microorganism comprises a biosynthetic pathway requiring an enzyme with keto-isovalerate decarboxylase (KIVD) activity, wherein said recombinant microorganism comprises at least one nucleic acid molecule encoding a modified decarboxylase, wherein said decarboxylase has one or more modifications or mutations at positions corresponding to amino acids selected from: (a) phenylalanine 305 of the F. novicida decarboxylase (SEQ ID NO: 198); (b) threonine 397 of the F. novicida decarboxylase (SEQ ID NO: 198); (c) serine 401 of the F. novicida decarboxylase (SEQ ID NO: 198); (d) isoleucine 481 of the F. novicida decarboxylase (SEQ ID NO: 198); (e) leucine 485 of the F. novicida decarboxylase (SEQ ID NO: 198); (f) phenylalanine 556 of the F. novicida decarboxylase (SEQ ID NO: 198); and (g) leucine 560 of the F. novicida decarboxylase (SEQ ID NO: 198). In an exemplary embodiment, the modified decarboxylase enzyme is derived from a corresponding unmodified decarboxylase that is at least about 65%, 70%, 75%, 80%, 85%, 90%, 91%, 92%, 93%, 94%, 95%, 96%, 97%, 98%, 99%, or 99.5% A identical to a polypeptide selected from SEQ ID NOs 1-214. In yet another embodiment, the recombinant microorganism comprises a biosynthetic pathway requiring an enzyme with keto-isovalerate decarboxylase (KIVD) activity, wherein said recombinant microorganism comprises at least one nucleic acid molecule encoding a modified decarboxylase, wherein said decarboxylase has one or more modifications or mutations at positions corresponding to amino acids selected from: (a) phenylalanine 292 of the S. cerevisiae PDC1 (SEQ ID NO: 241); (b) threonine 388 of the S. cerevisiae PDC1 (SEQ ID NO: 241); (c) alanine 392 of the S. cerevisiae PDC1 (SEQ ID NO: 241); (d) serine 408 of the S. cerevisiae PDC1 (SEQ ID NO: 241); (e) valine 410 of the S. cerevisiae PDC1 (SEQ ID NO: 241); (f) isoleucine 476 of the S. cerevisiae PDC1 (SEQ ID NO: 241); (g) glutamine 552 of the S. cerevisiae PDC1 (SEQ ID NO: 241); and (h) threonine 556 of the S. cerevisiae PDC1 (SEQ ID NO: 241). In an exemplary embodiment, the modified decarboxylase enzyme is derived from a corresponding unmodified decarboxylase that is at least about 65%, 70%, 75%, 80%, 85%, 90%, 91%, 92%, 93%, 94%, 95%, 96%, 97%, 98%, 99%, or 99.5% identical to a wild-type pyruvate decarboxylase. In one embodiment, the wild-type, unmodified pyruvate decarboxylase is obtained from a yeast microorganism. In a further embodiment, the wild-type, unmodified pyruvate decarboxylase is obtained from a yeast microorganism classified into a genera selected from the group consisting of Saccharomyces, Kluyveromyces, Candida, Pichia, Issatchenkia, Debaryomyces, Hansenula, Pachysolen, Yarrowia, Schizosaccharomyces, Tricosporon, Rhodotorula, and Myxozyma. In another further embodiment, the wild-type, unmodified pyruvate decarboxylase is obtained from a Saccharomyces yeast. In an exemplary embodiment, the wild-type, unmodified pyruvate decarboxylase is obtained from Saccharomyces cerevisiae. In another exemplary embodiment, the wild-type, unmodified pyruvate decarboxylase is PDC1 (SEQ ID NO: 241), PDC5 (SEQ ID NO: 242), or PDC6 (SEQ ID NO: 243) of S. cerevisiae. In yet another exemplary embodiment, the wild-type, unmodified pyruvate decarboxylase is selected from SEQ ID NOs: 244-251. In additional embodiments, the recombinant microorganism comprises a deletion or disruption of one or more endogenous pyruvate decarboxylase gene(s).

[0272] In an exemplary embodiment, the biosynthetic pathway is a pathway for the production of a beneficial metabolite selected from isobutanol, 1-propanol, 1-butanol, 2-methyl-1-butanl, 3-methyl-1-butanol, and 2-phenylethanol. In a further exemplary embodiment, the beneficial metabolite is isobutanol.

[0273] In a method to produce a beneficial metabolite (e.g., isobutanol) from a carbon source, the recombinant microorganism is cultured in an appropriate culture medium containing a carbon source. In certain embodiments, the method further includes isolating the beneficial metabolite (e.g., isobutanol) from the culture medium. For example, a beneficial metabolite (e.g., isobutanol) may be isolated from the culture medium by any method known to those skilled in the art, such as distillation, pervaporation, or liquid-liquid extraction. In certain exemplary embodiments, the beneficial metabolite is selected from isobutanol, 1-propanol, 1-butanol, 2-methyl-1-butanol, 3-methyl-1-butanol, and 2-phenylethanol. In a further exemplary embodiment, the beneficial metabolite is isobutanol.

[0274] In one embodiment, the recombinant microorganism may produce the beneficial metabolite (e.g., isobutanol) from a carbon source at a yield of at least 5 percent theoretical. In another embodiment, the microorganism may produce the beneficial metabolite (e.g., isobutanol) from a carbon source at a yield of at least about 10 percent, at least about 15 percent, about least about 20 percent, at least about 25 percent, at least about 30 percent, at least about 35 percent, at least about 40 percent, at least about 45 percent, at least about 50 percent, at least about 55 percent, at least about 60 percent, at least about 65 percent, at least about 70 percent, at least about 75 percent, at least about 80 percent, at least about 85 percent, at least about 90 percent, at least about 95 percent, or at least about 97.5 percent theoretical. In a specific embodiment, the beneficial metabolite is isobutanol.

### Distillers Dried Grains Comprising Spent Yeast Biocatalysts

[0275] In an economic fermentation process, as many of the products of the fermentation as possible, including the co-products that contain biocatalyst cell material, should have value. Insoluble material produced during fermentations using grain feedstocks, like corn, is frequently sold as protein and vitamin rich animal feed called distillers dried grains (DDG). See, e.g., commonly owned and co-pending U.S. Publication No. 2009/0215137, which is herein incorporated by reference in its entirety for all purposes. As used herein, the term “DDG” generally refers to the solids remaining after a fermentation, usually consisting of unconsumed feedstock solids, remaining nutrients, protein, fiber, and oil, as well as spent yeast biocatalysts or cell debris therefrom that are recovered by further processing from the fermentation, usually by a solids separation step such as centrifugation.

[0276] Distillers dried grains may also include soluble residual material from the fermentation, or syrup, and are then referred to as “distillers dried grains and solubles” (DDGS). Use of DDG or DDGS as animal feed is an economical use of the spent biocatalyst following an industrial scale fermentation process.

[0277] Accordingly, in one aspect, the present invention provides an animal feed product comprised of DDG derived from a fermentation process for the production of a beneficial metabolite (e.g., isobutanol), wherein said DDG comprise a spent yeast biocatalyst of the present invention. In an exemplary embodiment, said spent yeast biocatalyst has been engineered to comprise at least one nucleic acid molecule encoding a polypeptide with keto-isovalerate decarboxylase (KIVD) activity, wherein said polypeptide is at least about 65%, 70%, 75%, 80%, 85%, 90%, 91%, 92%, 93%, 94%, 95%, 96%, 97%, 98%, 99%, or 99.5% A identical to a polypeptide selected from SEQ ID NOs 1-214. In another exemplary embodiment, said spent yeast biocatalyst has been engineered to comprise at least one nucleic acid molecule encoding a polypeptide with keto-isovalerate decarboxylase (KIVD) activity, wherein said spent yeast biocatalyst comprises at least one nucleic acid molecule encoding a modified decarboxylase, wherein said decarboxylase has one or more modifications or mutations at positions corresponding to amino acids selected from: (a) aspartic acid 26 of the L. lactis KIVD (SEQ ID NO: 197); (b) histidine 112 of the L. lactis KIVD (SEQ ID NO: 197); (c) histidine 113 of the L. lactis KIVD (SEQ ID NO: 197); (d) glycine 402 of the L. lactis KIVD (SEQ ID NO: 197); and (e) glutamic acid 462 of the L. lactis KIVD (SEQ ID NO: 197). In an exemplary embodiment, the modified decarboxylase enzyme is derived from a corresponding unmodified decarboxylase that is at least about 65%, 70%, 75%, 80%, 85%, 90%, 91%, 92%, 93%, 94%, 95%, 96%, 97%, 98%, 99%, or 99.5% identical to a polypeptide selected from SEQ ID NOs 1-214. In yet another exemplary embodiment, said spent yeast biocatalyst has been engineered to comprise at least one nucleic acid molecule encoding a polypeptide with keto-isovalerate decarboxylase (KIVD) activity, wherein said spent yeast biocatalyst comprises at least one nucleic acid molecule encoding a modified decarboxylase, wherein said decarboxylase has one or more modifications or mutations at positions corresponding to amino acids selected from: (a) serine 286 of the L. lactis KIVD (SEQ ID NO: 197); (b) glutamine 377 of the L. lactis KIVD (SEQ ID NO: 197); (c) phenylalanine 381 of the L. lactis KIVD (SEQ ID NO: 197); (d) valine 461 of the L. lactis KIVD (SEQ ID NO: 197); (e) isoleucine 465 of the L. lactis KIVD (SEQ ID NO: 197); (f) methionine 538 of the L. lactis KIVD (SEQ ID NO: 197); and (g) phenylalanine 542 of the L. lactis KIVD (SEQ ID NO: 197). In an exemplary embodiment, the modified decarboxylase enzyme is derived from a corresponding unmodified decarboxylase that is at least about 65%, 70%, 75%, 80%, 85%, 90%, 91%, 92%, 93%, 94%, 95%, 96%, 97%, 98%, 99%, or 99.5% identical to a polypeptide selected from SEQ ID NOs 1-214. In yet another exemplary embodiment, said spent yeast biocatalyst has been engineered to comprise at least one nucleic acid molecule encoding a polypeptide with keto-isovalerate decarboxylase (KIVD) activity, wherein said spent yeast biocatalyst comprises at least one nucleic acid molecule encoding a modified decarboxylase, wherein said decarboxylase has one or more modifications or mutations at positions corresponding to amino acids selected from: (a) phenylalanine 305 of the F. novicida decarboxylase (SEQ ID NO: 198); (b) threonine 397 of the F. novicida decarboxylase (SEQ ID NO: 198); (c) serine 401 of the F. novicida decarboxylase (SEQ ID NO: 198); (d) isoleucine 481 of the F. novicida decarboxylase (SEQ ID NO: 198); (e) leucine 485 of the F. novicida decarboxylase (SEQ ID NO: 198); (f) phenylalanine 556 of the F. novicida decarboxylase (SEQ ID NO: 198); and (g) leucine 560 of the F. novicida decarboxylase (SEQ ID NO: 198). In an exemplary embodiment, the modified decarboxylase enzyme is derived from a corresponding unmodified decarboxylase that is at least about 65%, 70%, 75%, 80%, 85%, 90%, 91%, 92%, 93%, 94%, 95%, 96%, 97%, 98%, 99%, or 99.5% identical to a polypeptide selected from SEQ ID NOs 1-214. In yet another exemplary embodiment, said spent yeast biocatalyst has been engineered to comprise at least one nucleic acid molecule encoding a polypeptide with keto-isovalerate decarboxylase (KIVD) activity, wherein said spent yeast biocatalyst comprises at least one nucleic acid molecule encoding a modified decarboxylase, wherein said decarboxylase has one or more modifications or mutations at positions corresponding to amino acids selected from: (a) phenylalanine 292 of the S. cerevisiae PDC1 (SEQ ID NO: 241); (b) threonine 388 of the S. cerevisiae PDC1 (SEQ ID NO: 241); (c) alanine 392 of the S. cerevisiae PDC1 (SEQ ID NO: 241); (d) serine 408 of the S. cerevisiae PDC1 (SEQ ID NO: 241); (e) valine 410 of the S. cerevisiae PDC1 (SEQ ID NO: 241); (f) isoleucine 476 of the S. cerevisiae PDC1 (SEQ ID NO: 241); (g) glutamine 552 of the S. cerevisiae PDC1 (SEQ ID NO: 241); and (h) threonine 556 of the S. cerevisiae PDC1 (SEQ ID NO: 241). In an exemplary embodiment, the modified decarboxylase enzyme is derived from a corresponding unmodified decarboxylase that is at least about 65%, 70%, 75%, 80%, 85%, 90%, 91%, 92%, 93%, 94%, 95%, 96%, 97%, 98%, 99%, or 99.5% identical to a wild-type pyruvate decarboxylase. In one embodiment, the wild-type, unmodified pyruvate decarboxylase is obtained from a yeast microorganism. In a further embodiment, the wild-type, unmodified pyruvate decarboxylase is obtained from a yeast microorganism classified into a genera selected from the group consisting of Saccharomyces, Kluyveromyces, Candida, Pichia, Issatchenkia, Debaryomyces, Hansenula, Pachysolen, Yarrowia, Schizosaccharomyces, Tricosporon, Rhodotorula, and Myxozyma. In another further embodiment, the wild-type, unmodified pyruvate decarboxylase is obtained from a Saccharomyces yeast. In an exemplary embodiment, the wild-type, unmodified pyruvate decarboxylase is obtained from Saccharomyces cerevisiae. In another exemplary embodiment, the wild-type, unmodified pyruvate decarboxylase is PDC1 (SEQ ID NO: 241), PDC5 (SEQ ID NO: 242), or PDC6 (SEQ ID NO: 243) of S. cerevisiae. In yet another exemplary embodiment, the wild-type, unmodified pyruvate decarboxylase is selected from SEQ ID NOs: 244-251. In additional embodiments, the spent yeast biocatalyst comprises a deletion or disruption of one or more endogenous pyruvate decarboxylase gene(s).

[0278] In certain additional embodiments, the DDG comprising a spent yeast biocatalyst of the present invention comprise at least one additional product selected from the group consisting of unconsumed feedstock solids, nutrients, proteins, fibers, and oils.

[0279] In another aspect, the present invention provides a method for producing DDG derived from a fermentation process using a yeast biocatalyst (e.g., a recombinant yeast microorganism of the present invention), said method comprising: (a) cultivating said yeast biocatalyst in a fermentation medium comprising at least one carbon source; (b) harvesting insoluble material derived from the fermentation process, said insoluble material comprising said yeast biocatalyst; and (c) drying said insoluble material comprising said yeast biocatalyst to produce the DDG.

[0280] In certain additional embodiments, the method further comprises step (d) of adding soluble residual material from the fermentation process to said DDG to produce DDGS. In some embodiments, said DDGS comprise at least one additional product selected from the group consisting of unconsumed feedstock solids, nutrients, proteins, fibers, and oils.

[0281] This invention is further illustrated by the following examples that should not be construed as limiting. The contents of all references, patents, and published patent applications cited throughout this application, as well as the Figures and the Sequence Listings, are incorporated herein by reference for all purposes.

### Example 1

### Identification of High-Performance Polypeptides with KIVD Activity

[0282] The purpose of this example is to show how high-performance polypeptides with keto-isovalerate decarboxylase (KIVD) activity were identified. More specifically, this example describes the development of a bioinformatics method to identify proteins which have KIVD (ketoisovalerate decarboxylase) activity but little to no PDC (pyruvate decarboxylase) activity.

### Background

[0283] Misannotation of DNA and protein sequences is the assignment of an erroneous functional description to a sequence whose function has not been experimentally determined. The primary source of misannotation is using simple sequence comparison to assign function. With the advent of next generation sequencing technology and the resulting rapid release of new genome sequences, there has been a steady increase in misannotation. Levels of misannotation for over 25% of protein super-families in one or more databases have been observed (Schnoes et al., 2009, PloS Comput Biol. 5: e1000605).

[0284] To diminish the level of misannotation, it is necessary to use multiple sequence alignments and apply a phylogenetic approach to determine the relationship between a sequence in question and those that have been characterized. This should include both those sequences that have been shown to encode a given function as well as those that encode related functions. This allows for possible boundaries of a given function to be defined.

### Polypeptide Identification

[0285] To identify genes encoding polypeptides with KIVD activity, the sequences of various proteins of interest listed in Table 2 below were used as a starting point.

TABLE 2
Proteins from KIVD/IPDC/PDC Families*.

| Species | Definition | Abbr | Accession | PubMed ID |
|---|---|---|---|---|
| Enterobacter cloacae | indolepyruvate decarboxylase | ipdC_Ecl | AAG00523.2 | 18757531 |
| Paenibacillus polymyxa | indole-3-pyruvate decarboxylase | ipdC_Pp | ABV24338.1 | 18667851 |
| Azospirillum brasilense | Indole-3-pyruvate decarboxylase | ipdC_Abr | P51852.1 | 8202090 |
| Lactococcus lactis | alpha-ketoisovalerate decarboxylase | kivd_Ll | CAG34226.1 | 15358422 |
| Azospirillum lipoferum | Indole-3-pyruvic acid decarboxylase | ipdC_Ali | Q93RB7 | 11440156 |
| Pantoea agglomerans | Indolepyruvate decarboxylase | ipdC_Pa | P71323 | 11248099 |
| Saccharomyces cerevisiae | pyruvate decarboxylase | pdc1_Sc | CAA97573.1 | various |
| Zymobacter palmae | pyruvate decarboxylase | pdc_Zp | AAM49566.1 | 12039744 |
| Zymomonas mobilis | pyruvate decarboxylase | pdc_Zm | CAA42157.1 | 3546263 |

*KIVD = ketoisovalerate decarboxylase; IPDC = indole pyruvate decarboxylase; PDC = pyruvate decarboxylase.

[0286] For a preliminary examination the above sequences were aligned using clustalw2 (version 2.0.12). The alignment was examined with Jalview and areas of insertions and deletions were eliminated with the exception of those that were clearly specific to a lineage or sequence. The Phylip (version 3.69) programs ‘protdist’ and ‘neighbor’ were used to create an un rooted neighbor joining tree with boot strap values generated using the ‘seqboot’ and ‘consense’ programs (100 replicates). Boot strap values are shown for branch points (FIG. 3). It appears that IPDC (indole-pyruvate decarboxylase) arose at least twice and that the PDC (pyruvate decarboxylase) line may have given rise to KIVD (keto-isovalerate decarboxylase and one of the two IPDC (indole-pyruvate decarboxylase group).

[0287] Database Search Using Query Sequences:

[0288] The characterized sequences are used to search a protein or DNA sequence database (i.e., target database) using a sequence comparison program appropriate for the query sequence and the database being searched. The preferred approach is to compare protein sequences of the GenBank ‘nr’ (nonredundant) database using the blastp algorithm (version 2.2.23) with an expect value cutoff of 0.1. Sequences from the target database that are matched are referred to as “hits” and processed further.

[0289] In-Group and Out-Group Analysis:

[0290] As shown in FIG. 3, the sequences for the S. cerevisiae pyruvate decarboxylase, the E. cloacae indole-pyruvate decarboxylase, the P. agglomerans indole-pyruvate decarboxylase, and the L. lactis keto-isovalerate decarboxylase (herein called the “in-group”) are more closely related to each other than any of these four are related to the Z. palmae or Z. mobilis pyruvate decarboxylases (herein called the “out-group”). Sequence comparison using the blastp algorithm revealed that the lowest in-group bit score was 302. For comparisons between the in-group and out-group, no score was higher than 270. Finally the difference between the maximum non-self bitscore for the in-group comparison and the max bit score was never less than 133.

[0291] To further refine the set of hit sequences for multiple sequence alignment, only those with a maximum bit score to members of the in-group of 300 or greater and with a maximum out-group bit score that is 100 or more less than the maximum in-group bit score were worked with further. In other words, sequences for alignment preferably had a blast bit score of 300 or greater to one of the four members of the in group and having a maximum bit score to in group members that is at least 100 points higher than the maximum score to the out-group members.

[0292] To facilitate subsequent alignment procedures, hit sequences with lengths not falling between 450 and 650 amino acids, or that do not begin with a methionine may be eliminated.

[0293] Hit Groups from the In-Group Analysis: Also “hit” sequences may be grouped based on a 65% identity cutoff such that any member of a resulting group shares 65% identity with at least one other member of that group and that no member from different groups share 65% or greater identity based on standard blastp comparison. A single representative sequence from each group was chosen based on length with the longest sequence being chosen and if two or more sequences are of the maximum length one is chosen arbitrarily. All “hit” sequences were placed into one of several “hit groups” and given a reference identifier.

### Results

[0294] Phylogenetic Tree:

[0295] To create a phylogenetic tree, the representative sequences for each of the “hit groups” are first aligned using a multiple sequence alignment software preferably clustalw2 (version 2.0.12). Sequence alignments are then hand edited with sequences being discarded if they cause the introduction of a large number of gaps in the overall alignment. Positions in regions with large numbers of gaps are preferably deleted from the sequence alignment except where they are clearly specific to a lineage or sequence. The resulting edited alignment is preferably no less than 450 amino acids in length. Phylip (version 3.69) programs ‘protdist’ and ‘neighbor’ were used to create an un rooted neighbor joining tree with boot strap values generated using the ‘seqboot’ and ‘consense’ programs (1000 replicates)—this analysis allowed for the creation of an extended KIVD/IPDC/PDC protein family (see FIG. 4 of U.S. Provisional Application Ser. No. 61/512,810, which is herein incorporated by reference).

[0296] KIVD Proteins:

[0297] Sequences falling within the same clade as the L. lactis kivD (GenBank Accession No: CAG34226.1) or its representative, and that do not contain sequences associated with other activities are likely to also have KIVD activity. The likelihood a branch will have KIVD activity increases the closer a given branch is to a branch carrying KIVD. The tree in FIG. 4 can be used to further illustrate this point. The hit group “SEQ87” represents the L. lactis kivD (GenBank Accession No: CAG34226.1, SEQ ID NO: 197). Based upon this analysis, the hit group “SEQ69” would be more likely to have KIVD activity than the more distant hit group “SEQ16.”

### Example 2

### Structure-Based Sequence Determinants of Polypeptides with KIVD Specificity

[0298] The purpose of this example is to show how high-performance polypeptides with keto-isovalerate decarboxylase (KIVD) activity were identified using structure-based criteria for predicting the specificity of a polypeptide sequence homolog. Polypeptides exhibiting high keto-isovalerate decarboxylase (KIVD) activity with reduced pyruvate decarboxylase (PDC) activity were identified.

[0299] Polypeptide Identification:

[0300] Protein database BLAST searches revealed several significant hits. Notably, the crystal structures 2vbf (FIG. 5) and 2vbg correspond to the Branched-Chain Keto Acid Decarboxylase from L. lactis (KdcA), an enzyme which exhibits keto-isovalerate decarboxylase activity—crystal structures are available from the Protein Data Bank (“PDB”). KdcA is 88% identical to KivD from L. lactis. 1ovm is an indolepyruvate decarboxylase from E. cloacae (Ec_IPDC, 40% identity to KivD from L. lactis). There are a number of structures of the PDC from yeast (S. cerevisiae PDC, 37% identity to KivD from L. lactis) including various mutants: 1qpb, 2w93, 2vk8, 1pvd, 1pyd, 2vk1. 2vjy is PDC from K. lactis (KI_PDC, 37% identity to KivD from L. lactis). 2vbi is a PDC from A. pasteurianus (Ap_PDC, 32% identity to KivD from L. lactis). Besides the yeast, the other well-studied PDC is from Z. mobilis (Zm_PDC, 33% identity to KivD from L. lactis): 2wva, 3oe1, 1zpd.

[0301] Comparison between the Sc_PDC and KdcA was used to identify “specificity residues” involved in discriminating between pyruvate and keto-isovalerate (FIG. 6).

[0302] A spacefilling model for Sc_PDC illustrates a tight fit between pyruvate and the substrate-binding pocket is achieved (FIG. 7).

[0303] The sequence alignment between the L. lactis keto-isovalerate decarboxylases KivD and KdcA, and a homology model for the L. lactis KivD indicate that KdcA is an appropriate structural model for the L. lactis KivD. The two active sites are completely conserved amongst the two proteins (see FIG. 10 of U.S. Provisional Application Ser. No. 61/512,810, which is herein incorporated by reference). Importantly, the catalytic residues, D26, H112, H113, G402, and E462 are completely conserved. Likewise, the specificity residues, S286, Q377, F381, V461, I465, M538, and F542, are also conserved (see FIG. 10 of U.S. Provisional Application Ser. No. 61/512,810, which is herein incorporated by reference). This allowed for the identification of a KIVD substrate specificity motif, identified herein as “SQFVIMF” (SEQ ID NO: 237), which corresponds to the specificity residues, S286, Q377, F381, V461, I465, M538, and F542 of the L. lactis KIVD of SEQ ID NO: 197.

[0304] Once a set of specificity-determining sites had been identified, a blast search against the non-redundant protein sequence database was performed. The resulting 1000 sequences extend down to 25% sequence identity. This list was further filtered by eliminating hits in which 5 critical catalytic residues are absent: D26, H112, H113, G402, and E462. This excluded from consideration phenylpyruvate decarboxylase sequences (which lack one of the catalytic glutamic acids). For each of the remaining 508 sequences, the amino acids matched in the blast alignment to the L. lactis KivD specificity-determining residues: S286, Q377, F381, V461, I465, M538, and F542, were aligned. Each candidate sequence was classified according to the first true Boolean test (where M (Zm_PDC) refers to the number of “specificity residues” that match Zm_PDC). The following cutoffs were used to identify polypeptides with highly specific KIVD activity:

[0305] 1. If M(Zm_PDC)>6, classify the sequence “Specific PDC”.

[0306] 2. If M(Sc_PDC)>6, classify the sequence “Non-specific PDC”.

[0307] 3. If M(LI_KIVD)>6, classify the sequence “KIVD”.

[0308] 4. If M(Ec_IPDC)>6, classify the sequence “IPDC”.

[0309] 5. If M(LI_KIVD)>2 and M(Zm_PDC)<3 and M(Sc_PDC)<3 and V461 is conserved, classify the sequence “Potential KIVD”

[0310] 6. If M(LI_KIVD)<3 and M(Ec_IPDC)<3 and (M(Sc_PDC)>4 or M(Zm_PDC)>4), classify the sequence “Potential PDC”

[0311] 7. If Val461 is replaced with Ile and Gln377 is replaced with a beta branched amino acid (Val, Thr, Ile), classify the sequence “Unbranched” disfavoring a branched substrate)

[0312] 8. Classify the sequence “Unknown”.

[0313] The classified sequences were sorted based upon likely specific KIVD activity (i.e., most likely KIVD on top, most likely PDC on bottom). This sort is illustrated in FIG. 8. Using the above-identified cutoffs, 47 sequences were classified as KIVDs (FIG. 9).

[0314] The sequences returned from BLAST analysis are largely annotated as pyruvate decarboxylases or indolepyruvate decarboxylases. The specificity analysis of active site residues described herein suggests that many of the latter may harbor keto-isovalerate decarboxylase (KIVD) activity.

### Example 3

### Evaluation of Decarboxylase Enzymes for KIVD Activity and Substrate Specificity

[0315] The purpose of this example is to show how a high degree of identity to the KIVD substrate specificity motif “SQFVIMF” identified in Example 2 is generally predictive of: (a) high KIVD activity; (b) reduced PDC activity; and (c) a high KIV/pyruvate activity ratio.

[0316] In this example, 16 different decarboxylases representing a cross-section of decarboxylases, with varying degrees of identity to the “SQFVIMF” motif were selected from FIG. 8 and examined through in vitro enzyme assays. Table 3 lists the decarboxylases in a decreasing order of substrate specificity towards KIV as compared to pyruvate based on a statistical scoring mechanism for amino acid residues constituting the “SQFVIMF” motif.

[0317] Experimental Design: All decarboxylases tested in this example were codon-optimized for expression in S. cerevisiae. Plasmids comprising the individual decarboxylase homologs were used to generate transformants of S. cerevisiae strain, GEVO4001 (“4001”). Transformants were grown in shake flasks overnight at 33° C. at 250 rpm. The following day, 3 ml cultures were used to inoculate 50 mL growth medium at OD₆₀₀ of 0.2 and incubated at 33° C. at 250 rpm for 24 hrs. Cell pellets (OD₆₀₀ of 20 per pellet) were prepared and measured for KIVD and PDC activities in cell lysates.

[0318] FIGS. 10 and 11 show KIVD and PDC specific activity for the indicated decarboxylases, generally arranged in a decreasing order of percent amino acid identity to the L. lactis KIVD of SEQ ID NO: 197, as well as a decreasing identity score to the predicted KIVD substrate specificity motif “SQFVIMF”.

[0319] These data together suggest that the decarboxylases with a higher degree of identity to the predicted KIVD substrate specificity motif “SQFVIMF” tend to have higher KIVD activity and lower PDC activity. Conversely, decarboxylases with a higher PDC and lower specific KIVD activity exhibit a substrate specificity motif closer in identity to a predicted PDC substrate specificity motif “FTAIIQT” (SEQ ID NO: 238) as opposed to KIVD substrate specificity motif. A high KIV:Pyruvate activity ratio also seems to favor decarboxylase homologs with a higher degree of identity to the predicted KIVD motif as compared to the predicted PDC motif (FIG. 12). A notable exception is the decarboxylase derived from Francisella, which exhibited a substrate specificity score distinct from the identified KIVD substrate specificity motif.

TABLE 3
List of decarboxylase homologs with the indicated % protein identity (ID%)
relative to the L. lactis KIVD of SEQ ID NO: 197. Using protein structure
analysis as well as sequence alignment, the amino acid residues corresponding
to the identified likely specificity-determining residues (i.e., S286, Q377,
F381, V461, 1465, M538, and F542; “SQFVIMF”) were identified collectively as
a substrate specificity motif for IPDC, PDC1, PDC2, and PPDC. Each number
denotes the number of amino acid residues that each decarboxylase homolog
shares with the substrate specificity motif for KIVD, IPDC, PDC1, PDC2, and
PPDC. The profile of motif identity scores is used to
classify each decarboxylase homolog.

| | | | Specif- | | | | | | |
|---|---|---|---|---|---|---|---|---|---|
| | | | icity | | | | | | |
| | | | amino | | | | | | Classi- |
| Species | Gene | ID% | acids | kivd | ipdc | pdc1 | pdc2 | ppdc | fication |
| Lactococcus | Ll_KdcA_coSC | 88% | SQFVIMF | 7 | 3 | 1 | 1 | 0 | KIVD |
| lactis (KdcA) | | | (SEQ ID | | | | | | |
| | | | NO.: 252) | | | | | | |
| Staphylococcus | Se_p-iPDC_coSC | 47% | SQFVIIF | 6 | 3 | 1 | 1 | 0 | KIVD |
| epidermidis | | | (SEQ ID | | | | | | |
| | | | NO.: 253) | | | | | | |
| Macrococcus | Mc_iPDCh_coSC | 47% | SQFVIIF | 6 | 3 | 1 | 1 | 0 | KIVD |
| caseolyticus | | | (SEQ ID | | | | | | |
| | | | NO.: 254) | | | | | | |
| Bacillus | Bm_QM-B1551_iPDC_coSC | 46% | SQFVILF | 6 | 4 | 1 | 1 | 0 | KIVD |
| megaterium | | | (SEQ ID | | | | | | |
| QM B1551 | | | NO.: 255) | | | | | | |
| Staphylococcus | Ss_iPDC_coSC | 46% | SQFVIIF | 6 | 3 | 1 | 1 | 0 | KIVD |
| saprophyticus | | | (SEQ ID | | | | | | |
| | | | NO.: 256) | | | | | | |
| Bacillus cereus | Bc_BDRD-ST24_iPDC_coSC | 47% | TQFVILF | 5 | 5 | 1 | 1 | 1 | Potential |
| BDRD-ST24 | | | (SEQ ID | | | | | | KIVD |
| | | | NO.: 257) | | | | | | |
| Serratia | So_DSM-4582_iPDC_coSC | 44% | TQSVIVI | 3 | 4 | 1 | 1 | 1 | Potential |
| odorifera | | | (SEQ ID | | | | | | KIVD |
| DSM 4582 | | | NO.: 258) | | | | | | |
| Pectobacterium | Pcs_iPDC_coSC | 44% | TQCVIIL | 3 | 5 | 1 | 1 | 1 | Potential |
| carotovorum | | | (SEQ ID | | | | | | KIVD |
| subsp. | | | NO.: 259) | | | | | | |
| Serratia | Ssp_AS12_PDC_coSC | 43% | TQCVIVI | 3 | 4 | 1 | 1 | 1 | Potential |
| sp. AS12 | | | (SEQ ID | | | | | | KIVD |
| | | | NO.: 260) | | | | | | |
| Erwinia | Ep_Ep1/96_iPDC_coSC | 40% | SQAVIVL | 4 | 5 | 2 | 1 | 0 | Potential |
| pyrifoliae | | | (SEQ ID | | | | | | KIVD |
| Ep1/96 | | | NO.: 261) | | | | | | |
| Klebsiella | Kp_342_iPDC_coSC | 41% | TQAVIVL | 3 | 6 | 2 | 1 | 1 | IPDC |
| pneumoniae | | | (SEQ ID | | | | | | |
| 342 | | | NO.: 262) | | | | | | |
| Serratia | S_TPP-BDP_coSC | 38% | SNGII | 2 | 1 | 2 | 2 | 0 | Unknown |
| odorifera | | | (SEQ ID | | | | | | |
| 4Rx13 | | | NO.: 263) | | | | | | |
| Acinetobacter | Ab_ATCC19606_iPDC_coSC | 37% | VVNIIFI | 1 | 1 | 2 | 2 | 1 | Unbranched |
| baumannii | | | (SEQ ID | | | | | | |
| | | | NO.: 264) | | | | | | |
| Francisella | F_PDC_AkaDC_coSC | 36% | FTSIL | 0 | 0 | 3 | 2 | 0 | Unbranched |
| novicida | | | (SEQ ID | | | | | | |
| | | | NO.: 265) | | | | | | |
| Schizosaccharomyces | S_Scp_PDC_coSC | 39% | FTNIIQT | 1 | 1 | 6 | 3 | 0 | Non- |
| pombe | | | (SEQ ID | | | | | | specific |
| | | | NO.: 266) | | | | | | PDC |
| Acetobacter | Ap_PDC_coSC | 32% | YTWIIWV | 1 | 1 | 3 | 7 | 0 | Specific |
| pasteurianus | | | (SEQ ID | | | | | | PDC |
| | | | NO.: 267) | | | | | | |

[0320] Table 4 summarizes the results of experiments conducted in Example 3. The data suggests that decarboxylase homologs with a higher degree of identity score to the identified KIVD substrate specificity motif tend to favor more KIV and less PDC substrate specificity, although this correlation does not necessarily extend to increased KIVD activity. Of the five sequences classified as KIVD, all five had KIV/pyruvate activity ratios about 40. Of the five sequences classified as potential KIVD, two had KIV/pyruvate ratios>50, two others had KIV/pyruvate ratios>20, and the other had a modest preference for KIV.

[0321] Thus, the effect of the specificity motif imparts greater effects on substrate specificity (see bolded column highlighting KIV/Pyruvate Activity Ratio) and less on influencing KIVD specific activity. Accordingly, factors independent of the substrate specificity motif may also contribute to the amount of KIVD activity.

### Example 4

### Identification of Specificity Motif from Francisella Decarboxylase

[0322] A surprising result from the experiments performed in Example 3 was the favorable KIV/pyruvate ratio for the decarboxylase derived from Francisella cf. novicida 3523. This decarboxylase candidate had been classified as an “unbranched” decarboxylase, due to the use of several residues hypothesized to preclude activity for bulky branched substrates such as KIV. Specifically, the F. novicida decarboxylase favors KIV over pyruvate without using the same motif employed by other variants. Notably, it comprises F286, T377, and 1461 based on numbering from the L. lactis KivD—thus, the positioning of KIV was hypothesized to be restricted by the bulk of F286, the beta branching methyl of T377, and the additional methyl of 1461.

[0323] In this example, a partial model for Francisella cf. novicida 3523 decarboxylase was created by modeling mutations onto the structure of the L. lactis KdcA (2vbf). To approximate the KIV position, a KIV molecule was modeled using SHARPEN/OpenBabel to create the coordinates and PyMOL to adjust the torsions. The substrate was placed in accord with the observed ligand positions in 2vk1 and 2vbg, corresponding to structures from S. cerevisiae (PDC) and L. lactis (KdcA), respectively (FIG. 13).

TABLE 4
Profile of KIV and Pyruvate specific activity and KIV/pyruvate specific activity
ratio for decarboxylase homologs expressed in GEVO4001. Error bars for specific
activity values represent combined errors from two measurements. Error bars for
the specific activity ratios represent combined errors from two measurements.

| | | Spe- | KIV | Pyruvate | KIV/ | Pyruvate/ | Expression |
|---|---|---|---|---|---|---|---|
| | | cificity | “Specific” | “Specific” | Pyruvate | KIV | Relative to |
| | | amino | Activity | Activity | Activity | Activity | LI_KdcA |
| GENE | ID% | acids | (U/mg) | (U/mg) | Ratio | Ratio | (set to 100) |
| LI_KdcA_ | 88 | SQFVIMF | 17.6 ± 0.69 | 0.19 ± 0.1 | 91.2 ± 9.1 | 0.01 ± 0 | 100 ± 0 |
| coSC | | (SEQ ID | | | | | |
| | | NO.: 252) | | | | | |
| Se_p-iPDC_ | 47 | SQFVIIF | 1.2 ± 0.02 | 0.01 ± 0 | 93 ± 13.79 | 0.01 ± 0 | 60.8 ± 20.1 |
| coSC | | (SEQ ID | | | | | |
| | | NO.: 253) | | | | | |
| Mc_iPDCh_ | 47 | SQFVIIF | 9.1 ± 0.29 | 0.11 ± 0 | 77.4 ± 3.86 | 0.01 ± 0 | 100.7 ± 41.5 |
| coSC | | (SEQ ID | | | | | |
| | | NO.: 254) | | | | | |
| Bm_QM-B1551_ | 46 | SQFVILF | 0.4 ± 0.02 | 0 | 57.4 ± 15.75 | 0.01 ± 0 | 55.1 ± 21.3 |
| iPDC_coSC | | (SEQ ID | | | | | |
| | | NO.: 255) | | | | | |
| Ss_iPDC_coSC | 46 | SQFVIIF | 0.8 ± 0.02 | 0.01 ± 0 | 46.6 ± 8.6 | 0.02 ± 0 | 81.1 ± 33.9 |
| | | (SEQ ID | | | | | |
| | | NO.: 256) | | | | | |
| Bc_BDRD-ST24_ | 47 | TQFVILF | 1.9 ± 0.14 | 0.07 ± 0 | 27.8 ± 3.42 | 0.03 ± 0 | 133 ± 27.6 |
| iPDC_coSC | | (SEQ ID | | | | | |
| | | NO.: 257) | | | | | |
| So_DSM-4582_ | 44 | TQSVIVI | 9.7 ± 0.65 | 0.16 ± 0 | 59.2 ± 7.6 | 0.01 ± 0 | 118.1 ± 51.2 |
| iPDC_coSC | | (SEQ ID | | | | | |
| | | NO.: 258) | | | | | |
| Pcs_iPDC_ | 44 | TQCVIIL | 0.9 ± 0.11 | 0.03 ± 0 | 26.6 ± 5.19 | 0.03 ± 0 | 61 ± 7.2 |
| coSC | | (SEQ ID | | | | | |
| | | NO.: 259) | | | | | |
| Ssp_AS12_ | 43 | TQCVIVI | 5.8 ± 0.38 | 0.09 ± 0 | 61.6 ± 7.72 | 0.01 ± 0 | 152.8 ± 41.6 |
| PDC_coSC | | (SEQ ID | | | | | |
| | | NO.: 260) | | | | | |
| Ep_Ep1/96_ | 40 | SQAVIVL | 0 | 0 | 13.3 ± 21.9 | 0.15 ± 0.26 | 79.6 ± 3 |
| iPDC_coSC | | (SEQ ID | | | | | |
| | | NO.: 261) | | | | | |
| Kp_342_iPDC_ | 41 | TQAVIVL | 0.6 ± 0.03 | 0.02 ± 0 | 31.5 ± 6.8 | 0.03 ± 0 | 115 ± 21.2 |
| coSC | | (SEQ ID | | | | | |
| | | NO.: 262) | | | | | |
| S_TPP-BDP_ | 38 | SNGII | 0 | 0.04 ± 0 | 0.33 ± 0.10 | 4.6 ± 4.2 | 63.9 ± 32 |
| coSC | | (SEQ ID | | | | | |
| | | NO.: 263) | | | | | |
| Ab_ATCC19606_ | 37 | VVNIIFI | 0 | 0.05 ± 0 | 0.16 ± 0.23 | 6.03 ± 12.2 | 35.2 ± 26.3 |
| iPDC_coSC | | (SEQ ID | | | | | |
| | | NO.: 264) | | | | | |
| F_PDC_AkaDC_ | 36 | FTSIL | 6.7 ± 0.42 | 0.6 ± 0.18 | 14.82 ± 1.9 | 0.11 ± 0.0 | 80 ± 29.7 |
| coSC | | (SEQ ID | | | | | |
| | | NO.: 265) | | | | | |
| S_Scp_PDC_ | 39 | FTNIIQT | 0 | 0.41 ± 0.02 | 0 ± 0.0 | 19.2 ± 5.41 | 15.8 ± 22.3 |
| coSC | | (SEQ ID | | | | | |
| | | NO.: 266) | | | | | |
| Ap_PDC_coSC | 32 | YTWIIWV | 0 | 7.6 ± 0.30 | 0 ± 0.0 | 798.5 ± 259.31 | 74.5 ± 43.4 |
| | | (SEQ ID | | | | | |
| | | NO.: 267) | | | | | |
| GEVO4001 | n.a. | n.a. | 0 | 0 | 0% | 0 | 0 |
| (empty | | | | | | | |
| strain) | | | | | | | |

[0324] A sequence alignment between the L. lactis KivD and the Francisella decarboxylase allows for the identification of a separate motif capable of conferring KIV/pyruvate specificity, “FTSILFL” (SEQ ID NO: 240), corresponding to residues F305, T397, S401, I481, L485, F556, and L560 of the Francisella cf. novicida 3523 decarboxylase of SEQ ID NO: 198. Further analysis revealed that KIV can still be favored over pyruvate because the L485 residue has the flexibility to get out the way of KIV steric bulk, also creating space at the “top” of the active site (see FIG. 13). Characterization of the separate KIV/pyruvate specificity motif allowed for the identification of several additional decarboxylases harboring desired KIV/pyruvate specificity (see SEQ ID NOs: 199-214).

### Example 5

### Generation of Mutant PDC to Efficiently Catalyze Conversion of α-Ketoisovalerate to Isobutyraldehyde

[0325] This example shows how a mutant PDC can be generated which efficiently catalyzes the conversion of KIV to isobutyraldehyde.

[0326] This example was generated based upon (1) a visual inspection of the L. lactis branched-chain KdcA (LI_KDCA) structure (2vbf) and comparison of that structure with high-resolution models of the yeast PDC structure (2vk1 and 2vk8); (2) analysis of the experimentally observed KIV/pyruvate activity ratio described above in examples 3-4, and (3) protein modeling and design calculations that assessed the detailed energetic consequences that result from a panel of mutations to PDC.

[0327] Briefly, eight models for the wild-type yeast S. cerevisiae PDC1 (SEQ ID NO: 241) active site were obtained. Each pdb file (2vk1 and 2vk8) has four chains, with two active sites for the A/B dimer and two active sites for the C/D dimer. To convert these wild-type models, mutations were reverted to capture the active enzyme. Specifically, 2vk8 E477Q and 2vk1 A28D were converted. These models were prepared using the SHARPEN protein modeling library (Loksha et al., 2009, J. Comput. Chem. 30(6): 999-1005). SHARPEN is an open-source library rather than a standalone executable program; custom modeling tasks are performed by writing relatively short Python scripts. The first such script (FIG. 15) was used to generate models for wild-type S. cerevisiae PDC1 given several crystal structures for point mutations thereof. Subsidiary code is included in FIGS. 16 and 17.

[0328] Next, additional software was generated to use the SHARPEN protein modeling library to prospectively model individual mutations of interest and to decompose the resulting energy difference into component energy terms using an implementation of the all-atom Rosetta energy model (Rohl et al., 2004 Methods Enzymol. 383:66-93). The Rosetta energy model considers several physical terms: (i) van der Waals energy, (ii) Lazaridis-Karplus solvation energy, and (iii) hydrogen bonding energy. The energy model also includes several statistical, knowledge-based terms: (iv) a coarse-grained term that favors or penalizes the proximity of amino-acid centroids, (v) a term that favors sidechain conformations similar to canonical rotamers, (vi) a secondary structure propensity term that favors specific amino acids as a function of φ and ψ and, (vii) an amino-acid dependent reference energy. This energy function can catch unfavorable interactions that might not be properly assessed during a visual inspection of a protein model. Accordingly, prospective calculations that predict the detailed energetic consequences of mutations complement visual analysis.

[0329] To assess mutations in detail, models for the mutants were generated, allowing the mutated sidechains to select new conformations from an expanded Dunbrack rotamer library (FIG. 18). Models for a variety of mutations were calculated, including (a): I476V, (b): T388Q, (c): F292S, (d): A392F, (e): S408G, (f): A392F and S408G, (g): A392F, S408G, and V410D, (h): T556F, and (i): Q552M, wherein the mutations are relative to the S. cerevisiae PDC1 of SEQ ID NO: 241. To determine if these mutations were likely to be compatible with the remainder of S. cerevisiae PDC1 (SEQ ID NO: 241), we compared the Rosetta energy before and after the mutations, inspecting the individual components of the energy function to best understand the nature of the predicted energy shift. This detailed analysis proved useful to interpret the results of subsequent calculations in which multiple mutations were simultaneously introduced into our structural models for S. cerevisiae PDC1 (SEQ ID NO: 241).

[0330] After inspecting individual mutations, we turned to the larger problem of predicting the structure and Rosetta score of variants with multiple mutations. For each initial S. cerevisiae PDC1 wild-type model calculated above (SEQ ID NO: 241), a protein design calculation (FIG. 19) identified the sequence and the rotamer sidechain positions for that sequence which minimize the energy according to the all-atom Rosetta energy model. The sidechain combinatorial optimization used the FASTER algorithm as implemented in SHARPEN (Loksha et al., 2009, J. Comput. Chem. 30(6): 999-1005). Eight design positions were chosen as illustrated in Table 5. The choices were selected to encompass wild-type yeast PDC (*) or to match amino acids found in decarboxylases observed to exhibit a KIV/pyruvate activity ratio of >10, including (a): 292, Ser or Thr; (b): 388, Gln; (c): 392, Ala*, Ser, Cys, or Phe; (d) 408: Ser* or Gly; (e): 410: Val* or Pro; (f): 476: Val; (g): 552: Gln*, Met, Ile, Leu, or Val; and (h): 556: Thr*, Val, Phe, Ile, or Leu. Together these design alternatives comprise 2×4×2×2×5×5 combinations, a sequence space of 800 members (FIG. 20). The resulting calculations are shown in the redesign” column in Table 5. Beyond the enforced changes T388Q and I476V, redesign resulted in 1-2 additional mutations. To identify additional acceptable mutations, protein design calculations were repeated as described above, but with a penalty applied to disfavor solutions that retained the wild-type PDC amino acids. By increasing the penalty, and redesigning, sets of amino acids found in homologs with favorable KIV to pyruvate ratios that are likely to be compatible with existing PDC structure were identified.

[0331] The combined modeling analysis allowed for the determination that critical mutations of F292S, T388Q, and I476V are tolerable in the context of the yeast PDC structure, wherein the F292S, T388Q, and I476V mutations are relative to the S. cerevisiae PDC1 of SEQ ID NO: 241 and correspond with positions S286, Q377, and V461 of the L. lactis KivD (SEQ ID NO: 197). Modeling was also a useful filter to determine that candidate mutations at positions A392 (A392F) and T556 (T556F) result in steric clashes. Specifically, A392F leads to a clash with S408 and V410, while T556F results in a steric clash with D38, H114, D291, F292, Q552, and N560. Fortunately, however, the known favorable KIV/pyruvate activity of decarboxylase enzymes (Table 4) suggests alternate amino acids for residues 392 (Ser, Cys, Phe) and 556 (Val, Phe, Ile, Leu).

[0332] As observed in the design calculations, alternatives to phenylalanine at positions A392 and T556 could be incorporated into the PDC structure. An additional mutation at Q552 was also determined to confer beneficial properties. In sum, S. cerevisiae PDC1 harboring at least one of eight mutations at positions corresponding to the F292, T388, A392, S408, V410, 1476, Q552, and T556 positions of the S. cerevisiae PDC1 can be made to improve specificity for KIV.

[0333] Although the final design incorporates six mutations into the S. cerevisiae PDC1, the enzyme is virtually identical to the wild-type in terms of energy score (score of −1743 Rosetta energy units in the mutant enzyme versus a score of −1746 Rosetta energy units in the wild-type PDC enzyme).

TABLE 5
Summary of computational protein design calculations conducted on 4
different structural models (2vk1.AB, 2vk1.CD, 2vk8.CD, 2vk8.AB).

[chemical structure]

[chemical structure]

Last column indicates which residues were allowed at each position. KIVD column and “WT PDC” column indicate, respectively, which residue is adopted by the wild-type KIVD and PDC.
Shaded cells indicate amino acids other than wild-type PDC.
Boxed designs correspond to the final design (SEQ ID NOS.: 268-270).
A standard protein design calculation results in amino acid choices shown in “redesign” column.
Penalties disfavoring the wild-type PDC residue (a penalty of 1 or 2 Rosetta eu) resulted in desirable sequence.

[0334] The foregoing detailed description has been given for clearness of understanding only and no unnecessary limitations should be understood there from as modifications will be obvious to those skilled in the art.

[0335] While the invention has been described in connection with specific embodiments thereof, it will be understood that it is capable of further modifications and this application is intended to cover any variations, uses, or adaptations of the invention following, in general, the principles of the invention and including such departures from the present disclosure as come within known or customary practice within the art to which the invention pertains and as may be applied to the essential features hereinbefore set forth and as follows in the scope of the appended claims.

[0336] The disclosures, including the claims, figures and/or drawings, of each and every patent, patent application, and publication cited herein are hereby incorporated herein by reference in their entireties.

1.-101. (canceled)

102. A recombinant microorganism comprising at least one nucleic acid molecule encoding a modified decarboxylase enzyme, wherein the modified decarboxylase enzyme has one or more modifications or mutations at positions corresponding to amino acids selected from: (a) serine 286 of the L. lactis KIVD (SEQ ID NO: 197); (b) glutamine 377 of the L. lactis KIVD (SEQ ID NO: 197); (c) phenylalanine 381 of the L. lactis KIVD (SEQ ID NO: 197); (d) valine 461 of the L. lactis KIVD (SEQ ID NO: 197); (e) isoleucine 465 of the L. lactis KIVD (SEQ ID NO: 197); (f) methionine 538 of the L. lactis KIVD (SEQ ID NO: 197); and (g) phenylalanine 542 of the L. lactis KIVD (SEQ ID NO: 197).

103. The recombinant microorganism of claim 102, wherein the residue corresponding to position 286 of the L. lactis KIVD (SEQ ID NO: 197) is replaced with a residue selected from serine, threonine, asparagine, glycine, alanine, proline, glutamine, and aspartic acid.

104. The recombinant microorganism of claim 102, wherein the residue corresponding to position 377 of the L. lactis KIVD (SEQ ID NO: 197) is replaced with a residue selected from glutamine, serine, threonine, and asparagine.

105. The recombinant microorganism of claim 102, wherein the residue corresponding to position 381 of the L. lactis KIVD (SEQ ID NO: 197) is replaced with a residue selected from phenylalanine, alanine, isoleucine, leucine, methionine, tryptophan, tyrosine, and valine.

106. The recombinant microorganism of claim 102, wherein the residue corresponding to position 461 of the L. lactis KIVD (SEQ ID NO: 197) is replaced with a residue selected from valine, phenylalanine, alanine, isoleucine, leucine, methionine, tryptophan, and tyrosine.

107. The recombinant microorganism of claim 102, wherein the residue corresponding to position 465 of the L. lactis KIVD (SEQ ID NO: 197) is replaced with a residue selected from isoleucine, valine, phenylalanine, alanine, leucine, methionine, tryptophan, and tyrosine.

108. The recombinant microorganism of claim 102, wherein the residue corresponding to position 538 of the L. lactis KIVD (SEQ ID NO: 197) is replaced with a residue selected from methionine, isoleucine, leucine, valine, alanine, cysteine, glycine, phenylalanine, proline, tryptophan, and tyrosine.

109. The recombinant microorganism of claim 102, wherein the residue corresponding to position 542 of the L. lactis KIVD (SEQ ID NO: 197) is replaced with a residue selected from phenylalanine, isoleucine, leucine, methionine, valine, alanine, cysteine, glycine, proline, tryptophan, and tyrosine.

110.-122. (canceled)

123. The recombinant microorganism of claim 102, wherein the modified decarboxylase enzyme is derived from a corresponding unmodified decarboxylase enzyme selected from SEQ ID NOs 1-214.

124.-137. (canceled)

138. The recombinant microorganism of claim 102, wherein the modified decarboxylase enzyme is derived from a corresponding unmodified decarboxylase enzyme selected from the group consisting of PDC1 (SEQ ID NO: 241), PDC5 (SEQ ID NO: 242), and PDC6 (SEQ ID NO: 243) of Saccharomyces cerevisiae.

139. (canceled)

140. The recombinant microorganism of claim 102, wherein the recombinant microorganism comprises a deletion or disruption of one or more endogenous pyruvate decarboxylase genes.

141. The recombinant microorganism of claim 102, wherein the recombinant microorganism comprises an isobutanol producing metabolic pathway comprising one or more isobutanol metabolic pathway enzymes selected from acetolactate synthase, ketol-acid reductoisomerase, dihydroxy acid dehydratase, and alcohol dehydrogenase.

142. The recombinant microorganism of claim 141, wherein the recombinant microorganism comprises a ketol-acid reductoisomerase and the ketol-acid reductoisomerase is an NADH-dependent ketol-acid reductoisomerase (NKR).

143. The recombinant microorganism of claim 141, wherein the recombinant microorganism comprises an alcohol dehydrogenase and the alcohol dehydrogenase is an NADH-dependent alcohol dehydrogenase.

144. The recombinant microorganism of claim 102, wherein the recombinant microorganism comprises a metabolic pathway for the production of a metabolite selected from 1-propanol, 1-butanol, 2-methyl-1-butanol, 3-methyl-1-butanol, and 2-phenylethanol.

145. The recombinant microorganism of claim 102, wherein the recombinant microorganism is a yeast microorganism.

146. The recombinant microorganism of claim 102, wherein the recombinant microorganism is a prokaryotic microorganism.

147. A method of producing isobutanol, comprising:
(a) providing a recombinant microorganism of claim 141; and
(b) cultivating the recombinant microorganism in a culture medium containing a feedstock providing a carbon source until the isobutanol is produced.

148.-150. (canceled)

151. An isolated nucleic acid molecule encoding a modified decarboxylase enzyme, wherein the modified decarboxylase enzyme has one or more modifications or mutations at positions corresponding to amino acids selected from: (a) serine 286 of the L. lactis KIVD (SEQ ID NO: 197); (b) glutamine 377 of the L. lactis KIVD (SEQ ID NO: 197); (c) phenylalanine 381 of the L. lactis KIVD (SEQ ID NO: 197); (d) valine 461 of the L. lactis KIVD (SEQ ID NO: 197); (e) isoleucine 465 of the L. lactis KIVD (SEQ ID NO: 197); (f) methionine 538 of the L. lactis KIVD (SEQ ID NO: 197); and (g) phenylalanine 542 of the L. lactis KIVD (SEQ ID NO: 197).

152.-154. (canceled)

The application's sequence listing, which the Patent Office published only in electronic form, follows.

SEQUENCE LISTING (778 sequences)

SEQ ID NO: 1 - protein, 457 aa, Lactococcus lactis
MYTVGDYLLDRLHELGIEEIFGVPGDYNLQFLDQIISRKDMKWVGNANELNASYMADGYARTKKAAAFLTTFGVGELSAVNGLAGSYAENLPVVEIVGSPTSKVQNEGKFVHHTLADGDFKHFMKMHEPVTAARTLLTAENATVEIDRVLSTLLKERKPVYINLPVDVAAAKAEKPSLPLKKENPTSNTSDQEILNKIQESLKNAKKPIVITGHEIISFGLEKTVTQFISKTKLPITTLNFGKSSVDETLPSFLGIYNGKLSEPNLKEFVESADFILMLGVKLTDSSTGAFTHHLNENKMISLNINEGKIFNERIQNFDFESLISSLLDLSGIEYKGKYIDKKQEDFVPSNALLSQDRLWQAVENLTQSNETIVAEQGTSFFGASSIFLKPKSHFIGQPLWGSIGYTFPAALGSQIADKESRHLLFIGDGSLQLTVQDRKLQVQVSQPSSSHMNSYS

SEQ ID NO: 2 - protein, 547 aa, Lactococcus lactis
MYTVGDYLLDRLHELGIEEIFGVPGDYNLQFLDQIISREDMKWIGNANELNASYMADGYARTKKAAAFLTTFGVGELSAINGLAGSYAENLPVVEIVGSPTSKVQNDGKFVHHTLADGDFKHFMKMHEPVTAARTLLTAENATYEIDRVLSQLLKERKPVYINLPVDVAAAKAEKPALSLEKESSTTNTTEQVILSKIEESLKNAQKPVVIAGHEVISFGLEKTVTQFVSETKLPITTLNFGKSAVDESLPSFLGIYNGKLSEISLKNFVESADFILMLGVKLTDSSTGAFTHHLDENKMISLNIDEGIIFNKVVEDFDFRAVVSSLSELKGIEYEGQYIDKQYEEFIPSSAPLSQDRLWQAVESLTQSNETIVAEQGTSFFGASTIFLKSNSRFIGQPLWGSIGYTFPAALGSQIADKESRHLLFIGDGSLQLTVQELGLSIREKLNPICFIINNDGYTVEREIHGPTQSYNDIPMWNYSKLPETFGATEDRVVSKIVRTENEFVSVMKEAQADVNRMYWIELVLEKEDAPKLLKKMGKLFAEQNK

SEQ ID NO: 3 - protein, 457 aa, Lactococcus lactis
MYTVGDYLLDRLHELGIEEIFGVPGDYNLQFLDQIISRKDMKWVGNANELNASYMADGYARTKKAAAFLTTFGVGELSAVNGLAGSYAENLPVVEIVGSPTSKVQNEGKFVHHTLADGDFKHFMKMHEPVTAARTLLTAENATVEIDRVLSALLKERKPVYINLPVDVAAAKAEKPSLPLKKENPTSNTSDQEILNKIQESLKNAKKPIVITGHEIISFGLEKTVTQFISKTKLPITTLNFGKSSVDETLPSFLGIYNGKLSEPNLKEFVESADFILMLGVKLTDSSTGAFTHHLNENKMISLNINEGKIFNERIQNFDFESLISSLLDLSGIEYKGKYIDKKQEDFVPSNALLSQDRLWQAVENLTQSNETIVAEQGTSFFGASSIFLKPKSHFIGQPLWGSIGYTFPAALGSQIADKESRHLLFIGDGSLQLTVQERKLQVQVSQPSSSHMNSYS

SEQ ID NO: 4 - protein, 548 aa, Lactococcus lactis
MYTVGDYLLDRLHELGIEEIFGVPGDYNLQFLDQIISRKDMKWVGNANELNASYMADGYARTKKAAAFLTTFGVGELSAVNGLAGSYAENLPVVEIVGSPTSKVQNEGKFVHHTLADGDFKHFMKMHEPVTAARTLLTAENATVEIDRVLSALLKERKPVYINLPVDVAAAKAEKPSLPLKKENPTSNTSDQEILNKIQESLKNAKKPIVITGHEIISFGLENTVTQFISKTKLPITTLNFGKSSVDETLPSFLGIYNGKLSEPNLKEFVESADFILMLGVKLTDSSTGAFTHHLNENKMISLNIDEGKIFNESIQNFDFESLISSLLDLSGIEYKGKYIDKKQEDFVPSNALLSQDRLWQAVENLTQSNETIVAEQGTSFFGASSIFLKPKSHFIGQPLWGSIGYTFPAALGSQIADKESRHLLFIGDGSLQLTVQELGLAIREKINPICFIINNDGYTVEREIHGPNQSYNDIPMWNYSKLPESFGATEERVVSKIVRTENEFVSVMKEAQADPNRMYWIELVLAKEDAPKVLKKMGKLFAEQNKS

SEQ ID NO: 5 - protein, 556 aa, Melissococcus plutonius
MYTVADYLLDIVKALGADEVFGVPGDYNLNFLDHITSRKDLRWLGNANELNAAYMADGYARKKGFAAFVTTFGVGELSALNGFAGSKAEHVPVLEIVGTPLTPVQKASAPIHHTFGDGNFKKFEAAHQALGFHTAHLTHENAVEEINKLIKTMIETRQPAYLTIPMDVAEIQINQEIKNEIPALIKEPMEKTNSMLIELIMEQLNKAKSPIIFIGHELARFKLENFVEKFIVNNNLPFTNNGFSKGVVSESLPQFIGTYNGAFSKHMTKEIIDQADLILLLGVQLTDLVTGNFTQSFNDTKTIALNADHMRFFGKTENAQQPYHFASTIQALSEETISTSIKTGTAFSKMINQPNGTDNKLTQDFYDTAVAAFIQPEEVLFAEQGTSFLGLTMNELPNKARYNAQPLWGSIGYTFPAMLGSQVADPTSRNILSIGEGSLQMTIQEFGFAFRENLHPIILLIENSGYTIERFIHGMDESYNDVAQLDYGKIPQLFGAKKSDYLLRYVTTENELLEAFSQARENTDKLILIRIELAEKDAPKPLRDMVKAAEAAAKVN

SEQ ID NO: 6 - protein, 548 aa, Listeria grayi
MYTVGQYLVDRLEEIGIDKVFGVPGDYNLTFLDYIQNHEGLSWQGNTNELNAAYAADGYARERGVSALVTTFGVGELSAINGTAGSFAEQVPVIHIVGSPTMNVQSNKKLVHHSLGMGNFHNFSEMAKEVTAATTMLTEENAASEIDRVLETALLEKRPVYINLPIDIAHKAIVKPAKALQTEKSSGEREAQLAEIILSHLEKAAQPIVIAGHEIARFQIRERFENWINQTKLPVTNLAYGKGSFNEENEHFIGTYYPAFSDKNVLDYVDNSDFVLHFGGKIIDNSTSSFSQGFKTENTLTAANDIIMLPDGSTYSGISLNGLLAELEKLNFTFADTAAKQAELAVFEPQAETPLKQDRFHQAVMNFLQADDVLVTEQGTSSFGLMLAPLKKGMNLISQTLWGSIGYTLPAMIGSQIAAPERRHILSIGDGSFQLTAQEMSTIFREKLTPVIFIINNDGYTVERAIHGEDESYNDIPTWNLQLVAETFGGDAETVDTHNVFTETDFANTLAAIDATPQKAHVVEVHMEQMDMPESLRQIGLALSKQNS

SEQ ID NO: 7 - protein, 546 aa, Staphylococcus capitis
MKQRVGQYLIDAVYAAGVDKVFGVPGDFNLAFLDDIISHEHIEWIGNTNELNASYATDGYARINGLGAMVTTFGVGELSAVNGIAGSYAERVPVIAITGAPTRAVEEAGKFVHHSLGEGTFDDYRKMFEPITTAQGYITPENATTEIPRLINAAIQERRPVHLHLPIDVALAEIEVSETFQPEDVPHQDVKKYIDMIEDKLKSADQPLIIAGHEINSFNLHKELEEIVNQTNIPVAQLSLGKGAFNEENPHYIGVFDGEIAEDKIKDYVNNSDAILNIGAKLTDSATAGFSYEFDIDDVVMINHKNFKMNDTVANDVTLPSLIHGLKDLHFENKNDYLQYERPQKNNYELSDQPLTQETYFNMIQDFLQLDDILIAEQGTSFFGAYDLAMHKNNTFIGQPLWGSIGYTLPATLGTQIADPQRRNVLLIGDGSLQLTVQSLSTMIRQNLKPVIFVINNDGYTVERMIHGMKEPYNDIRMWDYKALPAVFGGDNVEVHDVNTSEELKRAFEKINANSDRMHYVEVKMAVEDAPVKLSEIAKAFASQNK

SEQ ID NO: 8 - protein, 546 aa, Staphylococcus aureus
MKQRIGAYLIDAIHRAGVDKIFGVPGDFNLAFLDDIISNPNVDWVGNTNELNASYAADGYARLNGLAALVTTFGVGELSAVNGIAGSYAERIPVIAITGAPTRAVEEAGKYVHHSLGEGTFDDYRKMFAHITVAQGYITPENATTEIPRLINTAIAERRPVHLHLPIDVAISEIEIPTPFEVTVAKDTDASIYIELLASKLHQSKQPIIITGHEINSFHLHQELEDFVNQTQIPVAQLSLGKGAFNEENPYYMGIYDGKIAEDKIRDYVDNSDLILNIGAKLTDSATAGFSYQFNIDDVVMLNHHNIKIDDVTNDEISLPSLLQQLTDISYTNNASFPAYHRPTSPDYTVGTESLTQQTYFKMMQNFLKPNDVIIADQGTSFFGAYDLALYKNNTFIGQPLWGSIGYTLPATLGSQLADKDRRNLLLIGDGSLQLTVQAISTMIRQHIKPVLFVINNDGYTVERLIHGMYEPYNEIHMWDYKALPAVFGGKNVEIHDVESSKDLQDTFNAINGHPDVMHFVEVKMSVEDAPKKLIDIAKAFSQQNK

SEQ ID NO: 9 - protein, 546 aa, Staphylococcus aureus
MNQRIGTYLIDAIHRAGVDKIFGVPGDFNLAFLDDIISNPNVDWVGNTNELNASYAADGYARLNGLAALVTTFGVGELSAVNGIAGSYAERIPVIAITGAPTRAVEQAGKYVHHSLGEGTFDDYRKMFAHITVAQGYITPENATTEIPRLINTAIAERRPVHLHLPIDVAISEIEIPTPFEVTAAKDTDASTYIELLASKLHQSKQPIIITGHEINSFHLHQELEDFVNQTQIPVAQLSLGKGAFNEENPYYMGIYDGKIAEDKIRDYVDNSDLILNIGAKLTDSATAGFSYQFNIDDVVMLNHHNIKIDDVTNDEISLPSLLQQLTDISYTNNAAFPAYHRPTSPDYTVGTEPLTQQTYFKMMQNFLKPNDVIIADQGTSFFGAYDLALYKNNTFMGQPLWGSIGYTLPATLGSQLADKDRRNLLLIGDGSLQLTVQAISTMIRQHIKPVLFVINNDGYTVERLIHGMYEPYNDIHMWDYKALPAVFGGKNVEIHDVESSKGLQDTFNAINSHPDVMHFVEVKMSVEDAPKKLIDIAKAFSQQNK

SEQ ID NO: 10 - protein, 546 aa, Staphylococcus aureus
MKQRIGAYLIDAIHRAGVDKIFGVPGDFNLAFLDDIISNPNVDWVGNTNELNASYAADGYARLNGLAALVTTFGVGELSAVNGIAGSYAERIPVIAITGAPTRAVEHAGKYVHHSLGEGTFDDYRKMFAHITVAQGYITPENATTEIPRLINTAIAERRPVHLHLPIDVAISEIEIPTPFEVTAAKDTDASTYIELLTSKLHQSKQPIIITGHEINSFHLHQELEDFVNQTQIPVAQLSLGKGAFNEENPYYMGIYDGKIAEDKIRDYVDNSDLILNIGAKLTDSATAGFSYQFNIDDVVMLNHHNIKIDDVTNDEISLPSLLKQLSNISYTNSATFPAYHRPTSPDYTVGTEPLTQQTYFKMMQNFLKPNDVIIADQGTSFFGAYDLALYKNNTFIGQPLWGSIGYTLPATLGSQLADKDRRNLLLIGDGSLQLTVQAISTMIRQHIKPVLFVINNDGYTVERLIHGMYEPYNEIHMWDYKALPAVFGGKNVEIHDVESSKDLQDTFNAINGHPDVMHFVEVKMSVEDAPKKLIDIAKAFSQQNK

SEQ ID NO: 11 - protein, 549 aa, Staphylococcus epidermidis
MKQRVGQYLMDAVYSAGADKVFGVPGDFNLAFLDDIIAHNDIKWIGNTNELNASYAADGYARINGIGAMVTTFGVGELSAVNGIAGSYAERVPVIAITGAPTRAVEQEGKYVHHSLGEGTFDDYRKMFEPITTAQAYITPDNATTEIPRVINTALQQRRPVHIHLPIDVALTEIEISNPFKPEVEPQKNVQSYINMVQDKLESASQPVIITGHEINSFHLHKELEQFVNQTQIPVVQLSLGKGAFNEENPYYMGIFDGSIAEQDIQDYVNQSDAILNIGAKLTDSATAGFSYQFDINEVIMLNHNEFKINDTCIEAFSLPNILNGLNKYIHYKNTNDFPQYERPQSHNYELSDQPLTQETYFNMMQDFLQQDDILIAEQGTSFFGAYDLALYKDNTFIGQPLWGSIGYTLPATLGTQIANPYRRNILLIGDGSLQLTVQSLSTMIRQNLNPVIFVINNDGYTVERMIHGMKEPYNDIRMWDYKSLPSVFGGDNVLVHDVNTSEELMLTFENIKSNSDRMHFVEVKMAVEDAPVKLSNIAKAFASQNKSS

SEQ ID NO: 12 - protein, 546 aa, Staphylococcus haemolyticus
MKQRVGQYLMDAVHRAGVDKIFGVPGDFNLAFLDDIVRHNGVEWVGTTNELNGSYAADGYARINGLGVLVTTFGVGELSAVNGIAGSYAERVPVIAITGAPTQAVEQAGKYVHHSLGEGRFDSYQKMFEHITTAQAYITAENATTEIPRVINAAIHERRPVHIHLPIDVAMTEIEVDSEYDVAPTADVNVERYIDMVADKLRSASQPVIITGHEINSFHLHKALEQFVNQTHIPVAQLSLGKGAFNEENPYYIGIYDGKIAEDQIKDYVDNSDAILNIGAKLTDSATAGFSYEFDIDDVVMLNHHNFKLNETIAEDVTLPSLIDGLNTIDYRYEGSFPTFEKGSSKEVALSDDILTQSTYFDMMQHFIKDDDVLLAEQGTSFFGAYDLALPKDMTFIGQPLWGSIGYTLPATLGTQMANSNRRNILLIGDGSLQLTVQELSTMIRQDIKPIIFVINNDGYTVERLIHGMEETYNDIRMWDYKALPKVFGGDNVVVHDVKTSNDLQNVFDAINAAPEQLHFTEVTMKWDDAPAKLRDISKAFAAQNK

SEQ ID NO: 13 - protein, 546 aa, Staphylococcus aureus
MKQRIGAYLIDAIHRAGVDKIFGVPGDFNLAFLDDIISNPNVDWVGNTNELNASYAADGYARLNGLAALVTTFGVGELSAVNGIAGSYAERIPVIAITGAPTRAVEHAGKYVHHSLGEGTFDDYRKMFAHITVAQGYITPENATTEIPRLINTAIAERRPVHLHLPIDVAISEIEIPTPFEVTAAKDTDASTYIELLTSKLHQSKQPIIITGHEINSFHLHQELEDFVNQTQIPVAQLSLGKGAFNEENPYYMGIYDGKIAEDKIRDYVDNSDLILNIGAKLTDSATAGFSYQFNIDDVVMLNHHNIKIDDVTNDEISLPSLLKQLSNISYTNNATFPAYHRPTSPDYTVGTEPLTQQTYFKMMQNFLKPNDVIIADQGTSFFGAYDLALYKNNTFIGQPLWGSIGYTLPATLGSQLADKDRRNLLLIGDGSLQLTVQAISTMIRQHIKPVLFVINNDGYTVERLIHGMYEPYNEIHMWDYKALPAVFGGKNVEIHDVESSKDLQDTFNAINGHPDVMHFVEVKMSVEDAPKKLIDIAKAFSQQNK

SEQ ID NO: 14 - protein, 546 aa, Staphylococcus epidermidis
MKQRVGQYLMDAVYAAGVDKVFGVPGDFNLAFLDDIISHDHIEWIGNTNELNASYATDGYARINGLGAMVTTFGVGELSAVNGIAGSYAERVPVIAITGAPTRAVEEAGKFVHHSLGEGTFDDYRKMFEPITTAQGYITPENATTEIPRLINAAIQERRPVHLHLPIDVALAEIEVSETFQPEALPQQDVQKYVNMIEDKLKSASQPLIIAGHEINSFNLHEELEEIVDRTNIPVVQLSLGKGAFNEENPHYVGIFDGEIAEDKIKEYVNNSDAILNIGAKLTDSATAGFSYQFDIDDVVMINHKNFKMNDTVANDVTLPSLVHALKGLNFKNENDYPQYERPQAHNYELNNQPLTQETYFNMMQDFIQLDDVLIAEQGTSFFGAYDLALYKDNTFIGQPLWGSIGYTLPATLGTQIANPHRRNVLLIGDGSLQLTVQSLSTMIRQDLKPIIFVINNDGYTVERMIHGMKEPYNDIKMWDYKALPAVFGGDNVAVHDVNNSEELMQAFEDIKAHNDRMHYVEVKMAVEDAPTKLSEIAKAFASQNK

SEQ ID NO: 15 - protein, 546 aa, Staphylococcus warneri
MKQRVGQYLMDAVNAAGVDKIFGVPGDFNLAFLDDIISHDQVEWIGNTNELNASYAADGYARINGLGALVITFGVGELSAVNGIAGSYAERVPVIAITGAPTRAVESAGKYVHHSLGEGTFDDYRKMFEPITTAQGYITPENATTEIPRLIQAAINERRPVHLHLPIDVSMTEIDVAKPFQPETRDDQDVSRYIQMIEDKLHSAKQPVIITGHEINSFGLHSELEQFVNQTHIPVAQLSLGKGAFNEENEHYLGIFDGSIAEENVKNYVNQSDAILNIGAKLTDSATAGFSFEFDIDDVVMINHNYFKMNETITEQVALPHLLNGLMTISYKNKSEFPKYQRPQGENYQIDHEPLTQATYFKMMQDFLQLDDILIAEQGSSFFGAYDLALYKDNTFIGQPLWGSIGYTLPATLGTEIAAPHRRNVLLIGDGSLQLTVQSLSTMIRQQLKPIIFVVNNDGYTVERLIHGMKEPYNDIHMWDYKALPAVFGGDNVVVHDVNTSHELKETFEKINANGDCMHFVEVKMAVEDAPAKLSDIAKAFASQNK

SEQ ID NO: 16 - protein, 546 aa, Staphylococcus aureus
MKQRIGAYLIDAIHRAGVDKIFGVPGDFNLAFLDDIISNPNVDWVGNTNELNASYAADGYARLNGLAALVTTFGVGELSAVNGIAGSYAERIPVIAITGAPTRAVEQAGKYVHHSLGEGTFDDYRKMFAHITVAQGYITPENATTEIPRLINTAIAERRPVHLHLPIDVAISEIEIPRPFEVTAAKDTDASTYIELLASKLHQSKQPIIITGHEINSFHLHQELEDFVNQTQIPVAQLSLGKGAFNEENPYYMGIYDGKIAEDKIRDYVDNSDLILNIGAKLTDSATAGFSYQFNIDDVVMLNHHNIKIDDVTNDEISLPSLLQQLTDISYTNNASFPAYHRPTSPDYTVGTEPLTQQTYFKMMQNFLKPNDVIIADQGTSFFGAYDLALYKNNTFIGQPLWGSIGYTLPATLGSQLADKDRRNLLLIGDGSLQLTVQAISTMIRQHIKPVLFVINNDGYTVERLIHGMYEPYNEIHMWDYKALPAVFGGKNVEIHDVESSKDLQDTFNAINGHPDVMHFVEVKMSVEDAPKKLIDIAKAFSQQNK

SEQ ID NO: 17 - protein, 546 aa, Staphylococcus caprae
MKQRVGQYLMDAVYAAGVDKVFGVPGDFNLAFLDDIISHEHIEWIGNTNELNASYATDGYARINGLGAMVTTFGVGELSAVNGIAGSYAERVPVIAITGAPTRAVEEAGKFVHHSLGEGTFDDYRKMFEPITTAQGYITPENATTEIPRLINAAIQERRPVHLHLPIDVALAEIEVSETFQPEDVPHQDVKKYIDMIEDKLKSANQPLIIAGHEINSFNLHKELEEIVNQTNIPVAQLSLGKGAFNEENPHYIGVFDGEIAEDKIKDYVNNSDAIFNIGAKLTDSATAGFSYEFDIDDVVMINHKNFKMNDTVANDVTLPSLVHGLKDLHFENKNDYPQYERPQKNNYELSDQPLIQETYFNMIQDFLQLDDILIAEQGTSFFGAYDLAMHKNNTFIGQPLWGSIGYTLPATLGTQIADPQRRNVLLIGDGSLQLTVQSLSTMIRQNLKPVIFVINNDGYTVERMIHGMKEPYNDIRMWDYKALPAVFGGDNVEVHDVNTSEELKRVFEKINANSDRMHYVEVKMAVEDAPVKLSEIAKAFASQNK

SEQ ID NO: 18 - protein, 546 aa, Staphylococcus aureus
MKQRIGAYLIDAIHRAGVDKIFGVPGDFNLAFLDDIISNPYVDWVGNTNELNASYAADGYARLNGLTALVTTFGVGELSAVNGIAGSYAERIPVIAITGAPTRAVEQGGKYVHHSLGEGTFDDYRKMFAHITVAQGYITPENATTEIPRLINTAIAERRPVHLHLPIDVAISEIEIPTPFEVTAAKDTDASTYIELLATKLHQAKQPIIITGHEINSFHLHQELEDFVNQTQIPVAQLSLGKGAFNEENPYYMGIYDGKIAEDKIRDYVDNSDLILNIGAKLTDSATAGFSYQFNIDDVVMLNHHNIKIDDVTNDEISLPSLLKQLSNISYTNNATFPAYHRPTSPDYTVGTAPLTQQTYFKMMQNFLKPNDVIIADQGTSFFGAYDLALYKNNTFIGQPLWGSIGYTLPATLGSQLADKDRRNLLLIGDGSLQLTVQAISTMIRQHIKPVLFVINNDGYTVERLIHGMYEPYNEIHMWDYKALPAVFGGKNVEIHDVESSKDLQDTFNAINGHPDVMHFVEVKMSVEDAPKKLIDIAKAFSQQNK

SEQ ID NO: 19 - protein, 546 aa, Staphylococcus aureus
MKQRIGAYLIDAIHRAGVDKIFGVPGDFNLAFLDDIISNPNVDWVGNTNELNASYAADGYARLNGLAALVTTFGVGELSAVNGIAGSYAERIPVIAITGAPTRAVEQAGKYVHHSLGEGTFDDYRKMFAHITVAQGYITPENATTEIPRLINTAIAERRPVHLHLPIDVAISEIEIPTPFEVTTAKDTDASTYIELLASKLHQSKQPIIITGHEINSFHLHQELEDFVNQTQIPVAQLSLGKGAFNEENPYYMGIYDGKIAEDKIRDYVDNSDLILNIGAKLTDSATAGFSYQFNIDDVVMLNHHNIKIDDVTNDEISLPSLLQQLTDISYTNNASFPAYHRPTSPDYTVGTEPLTQQTYFKMMQNFLKPNDVIIADQGTSFFGAYDLALYKNNTFIGQPLWGSIGYTLPATLGSQLADKDRRNLLLIGDGSLQLTVQAISTMIRQHIKPVLFVINNDGYTVERLIHGMYEPYNEIHMWDYKALPAVFGGKNVEIHDVESSKDLQEVFNAINGHPDVMHFVEVKMSVEDAPKKLIDIAKAFSQQNK

SEQ ID NO: 20 - protein, 546 aa, Staphylococcus aureus
MKQRIGAYLIDAIHRAGVDKIFGVPGDFNLAFLDDIISNPNVDWVGNTNELNASYAADGYARLNGLAALVTTFGVGELSAVNGIAGSYAERIPVIAITGAPTRAVEQAGKYVHHSLGEGTFDDYRKMFAHITVAQGYITPENAATEIPRLINTAIAERRPVHLHLPIDVAISEIEIPTPFEVTAAKDTDASTYIELLVSKLHQSKQPIIITGHEINSFHLHQELEDFVNQTQIPVAQLSLGKGAFNEENPYYMGIYDGKIAEDKIRDYVDNSDLILNIGAKLTDSATAGFSYQFNIDDVVMLNHHNIKIDDVTNDEISLSSLLQQLTDISYTNNASFPAYHRPTSPDYTVGTEPLTQQTYFKMMQNFLKPNDVIIADQGTSFFGAYDLALYKSNTFIGQPLWGSIGYTLPATLGSQLADKDRRNLLLIGDGSLQLTVQAISTMIRQHIKPVLFVINNDGYTVERLIHGMYEPYNEIHMWDYKALPAVFGGKNVEIHDVESSKDLQEVFNTINGHPDVIHFVEVKMSVEDAPKKLIDIAKAFSQQNK

SEQ ID NO: 21 - protein, 549 aa, Staphylococcus epidermidis
MKQRVGQYLMDAVYSAGADKVFGVPGDFNLAFLDDIIAHNHIKWIGNTNELNASYAADGYARINGIGAMVTTFGVGELSAVNGIAGSYAERVPVIAITGAPTRAVEQEGKYVHHSLGEGTFDDYRKMFEPITTAQAYITPDNATTEIPRVINAAIQQRRPVHIHLPIDVALTEIEVSKPFKAEVEPQKDVQSYINMVQDKLESATQPVIITGHEINSFHLHKELEQFVDQTQIPVVQLSLGKGAFNEENPYYMGIFDGSIAEQDIQDYVNQSDAILNIGAKLTDSATAGFSYQFDINDVIMLNHNEFKINDTCIEAFSLPNILNGLNKYIHYKNTNDFPQYERPQAHNYELSNQPLTQETYFNMMQDFLQQDDILIAEQGTSFFGAYDLALYKDNTFIGQPLWGSIGYTLPATLGTQIANPYRRNILLIGDGSLQLTVQSLSTMIRQHLNPVIFVINNDGYTVERMIHGMKEPYNDIRMWDYKSLPSVFGGDNVLVHDVNTSEELMLTFENIKSNSDRMHFVEVKMSVEDAPAKLSNIAKAFASQNKSS

SEQ ID NO: 22 - protein, 546 aa, Staphylococcus aureus
MKQRIGAYLIDAIHRAGVDKIFGVPGDFNLAFLDDIISNPNVDWVGNTNELNASYAADGYARLNGLAALVTTFGVGELSAVNGIAGSYAERIPVIAITGAPTRAVEQAGKYVHHSLGEGTFDDYRKMFAHITVAQGYITPENATTEIPRLINTAIAERRPVHLHLPIDVAISEIEIPTPFEVTAAKDTDASTYIELLASKLHQAKQPIIITGHEINSFHLHQELEDFVNQTQIPVAQLSLGKGAFNEENPYYMGIYDGKIAEDKIRDYVDNSDLILNIGAKLTDSATAGFSYQFNIDDVVMLNHHNIKIDDVTNDEISLPSLLKQLSNISYTNNATFPAYHRPTSPDYTVGTEPLKQQTYFKMMQNFLKPNDVIIADQGTSFFGAYDLALYKNNTFIGQPLWGSIGYTLPATLGSQLADKDRRNLLLIGDGSLQLTVQAISTMIRQHIKPVLFVINNDGYTVERLIHGMYEPYNEIHMWDYKALPAVFGGENVEIHDVESSKDLQDTFNAINGHPDVMHFVEVKMSVEDAPKKLIDIAKAFSQQNK

SEQ ID NO: 23 - protein, 549 aa, Staphylococcus epidermidis
MKQRVGQYLMDAVYSAGADKVFGVPGDFNLAFLDDIIAHNDIKWIGNTNELNASYAADGYARINGIGAMVTTFGVGELSAVNGIAGSYAERVPVIAITGAPTRAVEQEGKYVHHSLGEGTFDDYRKMFEPITTAQAYITPDNATTEIPRVINTALQQRRPVHIHLPIDVALTEIEISNPFKPEVEPQKNVQSYINMVQDKLELASQPVIITGHEINSFHLHKELEQFVNQTQIPVVQLSLGKGAFNEENPYYMGIFDGSIAEQDIQDYVNQSDAILNIGAKLTDSATAGFSYQFDINEVIMLNHNEFKINDTCIEAFSLPNILNGLNKYIHYKNTNDFPQYERPQSHNYELSDQPLTQETYFNMMQDFLQQDDILIAEQGTSFFGAYDLALYKDNTFIGQPLWGSIGYTLPATLGTQIANPYRRNILLIGDGSLQLTVQSLSTMIRQNLNPVIFVINNDGYTVERMIHGMKEPYNDIRMWDYKSLPSVFGGDNVLVHDVNTSEELMLTFENIKSNSDRMHFVEVKMAVEDAPVKLSNIAKAFASQNKSS

SEQ ID NO: 24 - protein, 546 aa, Staphylococcus epidermidis
MKQRVGQYLMDAVNAAGVDKIFGVPGDFNLAFLDDIISHDQVEWIGNTNELNASYAADGYARINGLGALVTTFGVGELSAVNGIAGSYAERVPVIAITGAPTRAVESAGKYVHHSLGEGTFDDYRKMFEPITTAQGYITPENATTEIPRLIQAAINERRPVHLHLPIDVAMTEIDVSKSFQPEARDDQDVSHYIQMIEDKLNSAKQPVIITGHEINSFGLHSELEQFVNQTHIPVAQLSLGKGAFNEENEHYLGIFDGSIAEENVKNYVNQSDAILNIGAKLTDSATAGFSFEFDIDDVVMINHNYFKMNETISEQVALPHLIKGLMSISYKNKSEFPMYQRPKEHDYQVDHEPLTQATYFKMMQDFLQLDDILIAEQGSSFFGAYDLALYKDNTFIGQPLWGSIGYTLPATLGTQIAAPHRRNVLLIGDGSLQLTVQSLSTMIRQQLKPIIFVVNNDGYTVERLIHGMKEPYNDIHMWDYKTLPAVFGGDNVVVHDVNTSHELKETFEKINAHSDCMHFVEVKMAIEDAPAKLSDIAKAFASQNK

SEQ ID NO: 25 - protein, 546 aa, Staphylococcus aureus
MKQRIGAYLIDAIHRAGVDKIFGVPGDFNLAFLDDIISNPNVDWVGNTNELNASYAADGYARLNGLAALVTTFGVGELSAVNGIAGSYAERIPVIAITGAPTRAVEQAGKYVHHSLGEGTFDDYRKMFAHITVAQGYITPENAATEIPRLINTAIAERRPVHLHLPIDVAISEIEIPTPFEVTAAKDTDASTYIELLVSKLHQSKQPIIITGHEINSFHLHQELEDFVNQTQIPVAQLSLGKGAFNEENPYYMGIYDGKIAEDKIRDYVDNSDLILNIGAKLTDSATAGFSYQFNIDDVVMLNHHNIKIDDVTNDEISLSSLLQQLTDISYTNNASFPAYHRPTSPDYTVGTEPLTQQTYFKMMQNFLKPNDVIIADQGTSFFGDYDLALYKSNTFIGQPLWGSIGYTLPATLGSQLADKDRRNLLLIGDGSLQLTVQAISTMIRQHIKPVLFVINNDGYTVERLIHGMYEPYNEIHMWDYKALPAVFGGKNVEIHDVESSKDLQEVFNTINGHPDVMHFVEVKMSVEDAPKKLIDIAKAFSQQNK

SEQ ID NO: 26 - protein, 546 aa, Staphylococcus aureus
MKQRIGAYLIDAIHRAGVDKIFGVPGDFNLAFLDDIISNPNVDWVGNTNELNASYAADGYARLNGLAALVTTFGVGELSAVNGIAGSYAERIPVIAITGAPTRAVEQGGKYVHHSLGEGTFDDYRKMFAHITVAQGYITPENATTEIPRLINTAIAERRPVHLHLPIDVAISEIEIPTPFEVTATKYTDASTYIELLATKLHQAKQPIIITGHEINSFHLHQELEDFVNQTQIPVAQLSLGKGAFNEENPYYMGIYDGKIAEDKIRDYVDNSDLILNIGAKLTDSATAGFSYQFNIDDVVMLNHHNIKIDDVTNDEISLPSLLKQLSNISYTNNATFPAYHRPTSPDYTVGTEPLTQQTYFKMMQNFLKPNDVIIADQGTSFFGAYDLALYKNNTFIGQPLWGSIGYTLPATLGSQLADKDRRNLLLIGDGSLQLTVQAISTMIRQHIKPVLFVINNDGYTVERLIHGMYEPYNEIHMWDYKALPAVFGGKNVEIHDVESSKDLQDTFNAINGHPDVMHFVEVKMAVEDAPKKLIDIAKAFSQQNK

SEQ ID NO: 27 - protein, 547 aa, Staphylococcus saprophyticus
MKKRVGQYLMDCISDVGVDKVFGVPGDFNLTFLDDIISRDDMEWIGNTNELNASYAADGYARMKGIAAMVTTFGVGELSAVNGIAGSYAERVPVIQITGAPTRAVESAGKYVHHSLGEGNFDDYRNMYASITTAQAYITPENAQSEIPRVINAALYEKRPVHIHLPIDVANSEIDVATPFEIEQRPQTDVTKYMTMVKDKLQSADKPVIITGHEINSFKLHEKLEQFVKQSQIPVVQLSLGKGAFNETSPYYMGIYDASLAEEDIRNYVDQSDAILNIGAKLTDSATAGYSYQFDIDDVVMINHHHFKMNETKDTEVSLVDLLDGLNAINYVNNAEFPKFKQPKAHDYDLTDEPLTQETYFKMMQDFIREEDVILAEQGTSFFGAYDLALKHNNKFIGQPLWGSIGYTLPATLGTQMADTSRRNLLLIGDGSLQLTVQEISTMIREKIKPIIFVINNDGYTVERKIHGENAMYNDIKMWDYKLLPTVFGGKDEVQVHDVNTSEAFQKVLLQIEAQPDTMHFIEVKMGVHDAPHKLNAIGQAFAKQNG

SEQ ID NO: 28 - protein, 549 aa, Staphylococcus epidermidis
MKQRVGQYLMDAVYSAGADKVFGVPGDFNLAFLDDIIAHNDIKWIGNTNELNASYAADGYARINGIGAMVTTFGVGELSAVNGIAGSYAERVPVIAITGAPTRAVEQEGKYVHHSLGEGTFDDYRKMFEPITTAQAYITPDNATTEIPRVINTAIQQRRPVHIHLPIDVALTEIEISNPFKPEVEPQKNVQSYINMVQDKLESASQPVIITGHEINSFHLHKELEQFVNQTQIPVVQLSLGKGAFNEENPYYMGIFDGSIAEQDIQDYVNQSDAILNIGAKLTDSATAGFSYQFDINEVIMLNHNEFKINDTCIEAFSLPNILNGLNKYIHYKNTNDFPQYERPQSHNYELSDQPLTQETYFNMMQDFLQQDDILIAEQGTSFFGAYDLALYKDNTFIGQPLWGSIGYTLPATLGTQIANPYRRNILLIGDGSLQLTVQSLSTMIRQNLNPVIFVINNDGYTVERMIHGMKEPYNDIRMWDYKSLPSVFGGDNVLVHDVNTSEELMLTFENIKSNSDRMHFVEVKMAVEDAPTKLSNIAKAFASQNKSS

SEQ ID NO: 29 - protein, 546 aa, Staphylococcus aureus
MKQRIGAYLIDAIHRAGVDKIFGVPGDFNLAFLDDIISNPNVDWVGNTNELNASYAADGYARLNGLAALVTTFGVGELSAVNGIAGSYAERIPVIAITGAPTRAVEQAGKYVHHSLGEGTFDDYRKMFAHITVAQGYITPENATTEIPRLINTAIAERRPVHLHLPIDVAISEIEMPTPFEVTPAQHTDAPKYIELLTSKLQQAKQPIIITGHEINSFHLHQELEDFVNQTHIPVAQLSLGKGAFNEENPYYMGIYDGKIAEDKIRDYVDNSDLILNIGAKLTDSATAGFSYQFNIDDVVMLNHHNIKIDDVTNDTVSLPSLLKQLSNVSYTNSASFPVYQRPTSPDYTVGTEPLTQQTYFKMMQNFLKPNDVIIADQGTSFFGAYDLALYKNNTFIGQPLWGSIGYTLPATLGSQLADKDRRNLLLIGDGSLQLTVQAISTMIRQHIKPVLFVINNDGYTVERLIHGMYEPYNEIHMWDYKALPAVFGGKNVEIHDVESSKDLQDTFNAINGHPDVMHFVEVKMSVEDAPKKLIDIAKAFSQQNK

SEQ ID NO: 30 - protein, 546 aa, Staphylococcus aureus
MKQRIGAYLIDAIHRAGVDKIFGVPGDFNLAFLDDIISNPNVDWVGNTNELNASYAADGYARLNGLAALVTTFGVGELSAVNGIAGSYAERIPVIAITGAPTRAVEQGGKYVHHSLGEGTFDDYRKMFAHITVAQGYITPENATTEIPRLINTAIAERRPVHLHLPIDVAISEIEIPTPFEVTATKDTDASTYIELLASKLHQAKQPIIITGHEINSFHLHQELEDFVNQTQIPVAQLSLGKGAFNEENPYYMGIYDGKIAEDKIRDYVDNSDLILNIGAKLTDSATAGFSYQFNIDDVVMLNHHNIKIDDVTNDEISLPSLLKQLSNISYTNNATFPAYHRPTSPDYTVGTEPLTQQTYFKMMQNFLKPNDVIIADQGTSFFGAYDLALYKNNTFIGQPLWGSIGYTLPATLGSQLADKDRRNLLLIGDGSLQLTVQAISTMIRQHIKPVLFVINNDGYTVERLIHGMYGPYNEIHMWDYKALPAVFGGKNVEIHDVESSKDLQDTFNAINGHPDVMHFVEVKMSVEDAPKKLIDIAKAFSQQNK

SEQ ID NO: 31 - protein, 546 aa, Staphylococcus aureus
MKQRIGAYLIDAIHRAGVYKIFGVPGDFNLAFLDDIISNPYVDWVGNTNELNASYAADGYARLNGLTALVTTFGVGELSAVNGIAGSYAERIPVIAITGAPTRAVEQGGKYVHHSLGEGTFDDYRKMFAHITVAQGYITPENATTEIPRLINTAIAERRPVHLHLPIDVAISEIEIPTPFEVTAAKDTDASTYIELLATKLHQAKQPIIITGHEINSFHLHQELEDFVNQTQIPVAQLSLGKGAFNEENPYYMGIYDGKIAEDKIRDYVDNSDLILNIGAKLTDSATAGFSYQFNIDDVVMLNHHNIKIDDVTNDEISLPSLLKQLSNISYTNNATFPAYHRPTSPDYTVGTAPLTQQTYFKMMQNFLKPNDVIIADQGTSFFGAYDLALYKNNTFIGQPLWGSIGYTLPATLGSQLADKDRRNLLLIGDGSLQLTVQAISTMIRQHIKPVLFVINNDGYTVERLIHGMYEPYNEIHMWDYKALPAVFGGKNVEIHDVESSKDLQDTFNAINGHPDVMHFVEVKMSVEDAPKKLIDIAKAFSQQNK

SEQ ID NO: 32 - protein, 546 aa, Staphylococcus aureus
MKQRIGAYLIDAIHRAGVDKIFGVPGDFNLAFLDDIISNPNVDWVGNTNELNASYAADGYARLNGLAALVTTFGVGELSAVNGIAGSYAERIPVIAITGAPTRAVEQAGKYVHHSLGESTFDDYRKMFAHITVAQGYITPENATTEIPRLINTAIAERRPVHLHLPIDVAISEIEIPRPFEVTAAKDTDASTYIELLASKLHQSKQPIIITGHEINSFHLHQELEDFVNQTQIPVAQLSLGKGAFNEENPYYMGIYDGKIAEDKIRDYVDNSDLILNIGAKLTDSATAGFSYQFNIDDVVMLNHHNIKIDDVTNDEISLPSLLQQLTDISYTNNASFPAYHRPTSPDYTVGTEPLTQQTYFKMMQNFLKPNDVIIADQGTSFFGAYDLALYKNNTFIGQPLWGSIGYTLPATLGSQLADKDRRNLLLIGDGSLQLTVQAISTMIRQHIKPVLFVINNDGYTVERLIHGMYEPYNEIHMWDYKALPAVFGGKNVEIHDVESSKDLQDTFNAINGHPDVMHFVEVKMSVEDAPKKLIDIAKAFSQQNK

SEQ ID NO: 33 - protein, 546 aa, Staphylococcus hominis
MKQRVGQYLMDAVHEAGVNKIFGIPGDFNLAFLDDIVSHEGVEWVGTTNELNGAYTADGYARMNGLGVLVTTFGVGELSAVNGIAGSYAERVPVIAITGAPTRAVEKAGKYVHHSLGEGRFDSYRHMFEPITTAQAYITPENATTEIPRVINAALQERRPVHIHLPIDVAMSDIEVEQPFKVENAPQQDVTQYVDMVADKLRSAQQPLIIAGHEINSFHLHDELEQFVNKTNIPVVQLSLGKGAFNEENPHYMGMYDGEIAKDDIKDYVDHSDAILNIGAKLTDSATAGFSYQFDINEVVMINHRLFKLNDTIDTEIALPEFLEALNTIDYTNKSSFPFYQQPESNDYELTDDTLTQDTYFKMMQDFIGGNDVLIAEQGSSFFGAYSLALPKNMSFIGQPLWGSIGYTLPATLGSQIANPHRRHILLIGDGSFQLTVQELSTMIRQDIKPVMFLINNDGYTVERLIHGMEEPYNDINMWDYKALPNVFGGDSVKVHDVKTSKDLKTVFDEINEDQEHMHFTEVTMKWDDAPQTLRDISKAFANQNK

SEQ ID NO: 34 - protein, 546 aa, Staphylococcus aureus
MKQRIGAYLIDAIHRAGVDKIFGVPGDFNLAFLDDIISNPNVDWVGNTNELNASYAADGYARLNGLAALVTTFGVGELSAVNGIAGSYAERIPVIAITGAPTRAVEQAGKYVHHSLGEGTFDDYRKMFAHITVAQGYITPENAATEIPRLINTAIAERRPVHLHLPIDVAISEIEIPTPFEVTAAKDTDASTYIELLVSKLHQSKQPIIITGHEINSFHLHQELEDFVNQTQIPVAQLSLGKGAFNEENPYYMGIYDGKIAEDKIRDYVDNSDLILNIGAKLTDSATAGFSYQFNIDDVVMLNHHNIKIDDVTNDEISLSSLLQQLTDISYTNNASFPAYHRPTSPDYTVGTEPLTQQTYFKMMQNFLKPNDVIIADQGTSFFGAYDLALYKSNTFIGQPLWGSIGYTLPATLGSQLADKDRRNLLLIGDGSLQLTVQAISTMIRQHIKPVLFVINNDGYTVERLIHGMYEPYNEIHMWDYKALPAVFGGKNVEIHDVESSKDLQEVFNTINGHPDVMYFVEVKMSVEDAPKKLIDIAKAFSQQNK

SEQ ID NO: 35 - protein, 548 aa, Staphylococcus carnosus
MMKKRVGEYLMDCLSNTGVEKVFGVPGDFNLAFLDDIISRDDIEWVGNTNELNASYAADGYARMKGISAMVTTFGVGELSAVNGIAGSYAERVPVVAITGAPTRAVEDAGKYVHHSLGEGTFDNYRKMFKEITTAQGYITPENAQTEIPRLLDAALAEKRPVHLHLPIDVAMTEIEVESTYEVPERKVEDVSKYIAMVKDKLESASQPVIIAGHEINSFKLHEQLEDFVNKTHIPVAQLSLGKGAFNEENPYYMGIYDGSIAEENIRDYVDNSDAILNIGAKLTDSATAGFSFEFDIDDVVMLNQHNFKMNETVAEDVTLPDLMDGLMEMDYVNEADYPKFKRPETGQYELNGDALTQETYFKMMQDFLAPSDVILAEQGTSFFGAYDLALYKGNKFVGQPLWGSIGYTLPATIGTQIADPKRRNLLLIGDGSLQLTVQGISTMIRQGLKPVLFVINNDGYTVERKIHGENEPYNDIFMWDYKALPAVFGGEDVVKVRDVSTSEELDQAFEAIKAYPDMMHFVEVKMAMHDAPHKLDAIGKAFAKQNS

SEQ ID NO: 36 - protein, 546 aa, Staphylococcus lugdunensis
MKQRVGQYLMDAIYQAGADRVFGVPGDFNLAFLDDIVAHEHLQWVGNTNELNASYAADGYARLKGVSALVTTFGVGELSAVNGIAGSYAERVPVIAITGAPTRAVEQAKKYVHHSLGEGTFDDYQKMFSHITTAQGYITPENATTEIPRLINASLQERRPVHIHLPIDVAMTEIEVTEPFKLQNPKQHDVSEYIKLIQQKLQSASNPVIIAGHEINSFHLHDALEQLVNQTNIPVAQLSLGKGAFNEENPHYLGIFDGKFAEDNVRDYVNNSDAILNIGAKLTDSATGGFSYDFDIEDVVMINHHNFKLGDTQNNEVSLPDMLHGLLEMDYHNKGTYSSYVRPKAHSYTLSDEPLTQETYFNMIQDFLQPDDVLLAEQGTSFFGAYDLALYKNVDFIGQPLWGSIGYTLPATIGSQMADTTRRNILLIGDGSLQLTVQGLSTMIRNQLKPIIFVINNDGYTVERLIHGMKAPYNDIHMWDYKALPAVFGGDNVAIHDVHTSNDLKRTFDEINAESDVMHYVEVTMAAEDAPEKLANIAEAFASQNK

SEQ ID NO: 37 - protein, 546 aa, Staphylococcus aureus
MKQRIGAYLIDAFHRAGVDKIFGVPGDFNLAFLDDIISNPNVDWVGNTNELNASYAADGYARLNGLAALVTTFGVGELSAVNGIAGSYAERIPVIAITGAPTRAVEQAGKYVHHSLGEGTFDDYRKMFAHITVAQGYITPENATTEIPRLINTAIAERRPVHLHLPIDVAISEIEIPTPFEVTATKDTDASTYIELLATKLHQAKQPIIITGHEINSFHLHQELEDFVNQTQVPVAQLSLGKGAFNEENPYYMGIYDGKIAEDKIRDYVDNSDLILNIGAKLTDSATAGFSYQFNIDDVVMLNHHNIKIDDVTNDEISLPSLLKQLSNISYTNSATFPAYHRPTSPDYTVGTEPLTQQTYFKMMQNFLKPNDVIIADQGTSFFGAYDLALYKNNTFIGQPLWGSIGYTLPATLGSQLADKDRRNLLLIGDGSLQLTVQAISTMIRQHIKPVLFVINNDGYTVERLIHGMYEPYNEIHMWDYKALPAVFGGKNVEIHDVESSKDLQDTFNAINGHPDVMHFVEVKMSVEDAPKKLIDIAKAFSQQNK

SEQ ID NO: 38 - protein, 546 aa, Staphylococcus aureus
MKQRIGAYLIDAIHRAGVDKIFGVPGDFNLAFLDDIISNPNVDWVGNTNELNASYAADGYARLNGLAALVTTFGVGELSAVNGIAGSYAERIPVIAITGAPTRAVEQAGKYVHHSLGEGTFDDYRKMFAHITVAQGYITPENATTEIPRLINTAIAERRPVHLHLPIDVAISEIEIPTPFEVTAAKDTDASTYIELLASKLHQSKQPIIITGHEINSFHLHQELEDFVNQTQIPVAQLSLGKGAFNEENPYYMGIYDGKIAEDKIRDYVDNSDLILNIGAKLTDSATAGFSYQFNIDDVVMLNHHNIKIDDVTNDEISLPSLLQQLTDISYTNNAAFPAYHRPTSPDYTVGTEPLTQQTYFKMMQNFLKPNDVIIADQGTSFFGAYDLALYKNNTFIGQPLWGSIGYTLPATLGSQLADKDRRNLLLIGDGSLQLTVQAISTMIRQHIKPVLFVINNDGYTVERLIHGMYEPYNEIHMWDYKALPAVFGGKNVEIHDVESSKDLQDTFNAINGHPDVMHFVEVKMSVEDAPKKLIDIAKAFSQQNK

SEQ ID NO: 39 - protein, 546 aa, Staphylococcus aureus
MKQRIGTYLIDAIHRAGVDKIFGVPGDFNLAFLDDIISNPNVDWVGNTNELNASYAADGYARLNGLAALVTTFGVGELSAVNGIAGSYAERIPVIAITGAPTRAVEQAGKYVHHSLGEGTFDDYRKMFAHITVAQGYITPENATTEIPRLINTAIAERRPVHLHLPIDVAISEIEIPTPFEVTAAKDTDASTYIELLASKLHQSKQPIIITGHEINSFHLHQELEDFVNQTQIPVAQLSLGKGAFNEENPYYMGIYDGKIAEDKIRDYVDNSDLILNIGAKLTDSATAGFSYQFNIDDVVMLNHHNIKIDDVTNDEISLPSLLQQLTDISYTNNAAFPAYHRPTSPDYTVGTEPLTQQTYFKMMQNFLKPNDVIIADQGTSFFGAYDLALYKNNTFMGQPLWGSIGYTLPATLGSQLADKDRRNLLLIGDGSLQLTVQAISTMIRQHIKPVLFVINNDGYTVERLIHGMYEPYNDIHMWDYKALPAVFGGKNVEIHDVESSKDLQDTFNAINSHPDVMHFVEVKMSVEDAPKKLIDIAKAFSQQNK

SEQ ID NO: 40 - protein, 546 aa, Macrococcus caseolyticus
MKQRIGQYLIDALHVNGVDKIFGVPGDFTLAFLDDIIRHDNVEWVGNTNELNAAYAADGYARVNGLAAVSTTFGVGELSAVNGIAGSYAERVPVIKISGGPSSVAQQEGRYVHHSLGEGIFDSYSKMYAHITATTTILSVDNAVDEIDRVIHCALKEKRPVHIHLPIDVALTEIEIPHAPKVYTHESQNVDAYIQAVEKKLMSAKQPVIIAGHEINSFKLHEQLEQFVNQTNIPVAQLSLGKSAFNEENEHYLGIYDGKIAKENVREYVDNADVILNIGAKLTDSATAGFSYKFDTNNIIYINHNDFKAEDVISDNVSLIDLVNGLNSIDYRNETHYPSYQRSDMKYELNDAPLTQSNYFKMMNAFLEKDDILLAEQGTSFFGAYDLSLYKGNQFIGQPLWGSIGYTFPSLLGSQLADMHRRNILLIGDGSLQLTVQALSTMIRKDIKPIIFVINNDGYTVERLIHGMEEPYNDIQMWNYKQLPEVFGGKDTVKVHDAKTSNELKTVMDSVKADKDHMHFIEVHMAVEDAPKKLIDIAKAFSDANK

SEQ ID NO: 41 - protein, 546 aa, Staphylococcus aureus
MKQRIGAYLIDAIHRAGVDKIFGVPGDFNLAFLDDIISNPNVDWVGNTNELNASYAADGYARLNGLAALVTTFGVGELSAVNGIAGSYAERIPVIAITGAPTRAVEQAGKYVHHSLGEGTFDDYRKMFAHITVAQGYITPENAATEIPRLINTAIAERRPVHLHLPIDVAISEIEIPTPFEVTAAKDTDASTYIELLVSKLHQSKQPIIITGHEINSFHLHQELEDFVNQTQIPVAQLSLGKGAFNEENPYYMGIYDGKIAEDKIRDYVDNSDLILNIGAKLTDSATAGFSYQFNIDDVVMLNHHNIKIDDVTNDEISLSSLLQQLTDISYTNNASFPAYHRPTSPDYTVGTEPLTQQTYFKMMQNFLKPNDVIIADQGTSFFGAYDLALYKSNTFIGQPLWGSIGYTLPATLGSQLADKDRRNLLLIGDGSLQLTVQAISTMIRQHIKPVLFVINNDGYTVERLIHGMYEPYNEIHMWDYKALPAVFGGKNVEIHDVESSKDLQEVFNTINGHPDVMHFVEVKMSVEDAPKKLIDIAKAFSQQNK

SEQ ID NO: 42 - protein, 546 aa, Staphylococcus aureus
MKQRIGAYLIDAFHRAGVDKIFGVPGDFNLAFLDDIISNPNVDWVGNTNELNASYAADGYARLNGLAALVTTFGVGELSAVNGIAGSYAERIPVIAITGAPTRAVEQAGKYVHHSLGEGTFDDYRKMFAHITVAQGYITPENATTEIPRLINTAIAERRPVHLHLPIDVAISEIEIPTPFEVTATKDTDASTYIELLATKLHQAKQPIIITGHEINSFHLHQELEDFVNQTQIPVAQLSLGKGAFNEENPYYMGIYDGKIAEDKIRDYVDNSDLILNIGAKLTDSATAGFSYQFNIDDVVMLNHHNIKIDDVTNDEISLPSLLKQLSNISYTNSATFPAYHRPTSPDYTVGTEPLTQQTYFKMMQNFLKPNDVIIADQGTSFFGAYDLALYKNNTFIGQPLWGSIGYTLPATLGSQLADKDRRNLLLIGDGSLQLTVQAISTMIRQHIKPVLFVINNDGYTVERLIHGMYEPYNEIHMWDYKALPAVFGGKNVEIHDVESSKDLQDTFNAINGHPDVMHFVEVKMSVEDAPKKLIDIAKAFSQQNK

SEQ ID NO: 43 - protein, 546 aa, Staphylococcus hominis
MKQRVGQYLMDAVHEAGVNKIFGVPGDFNLAFLDDIVSHEGVEWVGTTNELNGAYTADGYARMNGLGVLVTTFGVGELSAVNGIAGSYAERVPVIAITGAPTRAVEKAGKYVHHSLGEGRFDSYRHMFEPITTAQAYITPENATTEIPRVINAALQERRPVHIHLPIDVAMSDIEVEQPFKVEKAPQQDVTQYVDMLANQLRSAQQPLIIAGHEINSFHLHDELEQFVNKTNIPVVQLSLGKGAFNEENPHYMGIYDGKIAKDDIKDYVDHSDAILNIGAKLTDSATAGFSYQFDINEVVMINHRLFKLNDTIDTEIALPEFLEALNTIDYTNKSSFPSYQQPESNDYELTDDMLTQDIYFKMMQDFIGGDDILIAEQGTSFFGAYSLTLPKNMSFIGQPLWGSIGYTLPATLGSQLANPHRRNILLIGDGSFQLTVQELSTMIRQDIKPVIFLINNDGYTVERLIHGMEEPYNDINMWDYKALPNVFGGDSVKVHDVKTSKDLKAVFDEINEDQEHMHFTEVTMKWDDAPQTLRDISKAFANQNK

SEQ ID NO: 44 - protein, 546 aa, Staphylococcus aureus
MKQRIGAYLIDAIHRAGVDKIFGVPGDFNLAFLDDIISNPNVDWVGNTNELNASYAADGYARLNGLAALVTTFGVGELSAVNGIAGSYAERIPVIAITGAPTRAVEQAGKYVHHSLGEGTFDDYRKMFAHITVAQGYITPENATTEIPRLINTAIAERRPVHLHLPIDVAISEIEIPTPFEVTATKDTDASTYIELLATKLHQAKQPIIITGHEINSFHLHQELEDFVNQTQIPVAQLSLGKGAFNEENPYYMGIYDGKIAEDKIRDYVDNSDLILNIGAKLTDSATAGFSYQFNIDDVVMLNHHNIKIDDFTNDEISLPSLLKQLSNISYTNNASFPAYHRPTSPDYTVGTEPLTQQTYFKMMQNFLKPNDVIIADQGTSFFGAYDLALYKNNTFIGQPLWGSIGYTLPATLGSQLADKDRRNLLLIGDGSLQLTVQAISTMIRQHIKPVLFVINNDGYTVERLIHGMYEPYNEIHMWDYKALPAVFGGKNVEIHDVESSKDLQDTFNAINGHPDVMHFVEVKMSVEDAPKKLIDIAKAFSQQNK

SEQ ID NO: 45 - protein, 548 aa, Staphylococcus pseudintermedius
MMKKRIGQFLIDEIAKQGVDKIFGVPGDFNLTFLDDIEAHETLEWVGNTNELNASYAADGYARLNGLAAMVTTFGVGELSAVNGIAGSYAENVPVIQITGAPTTVVEQAGKYVHHSLGNGKFDDYQKMYAQITETQTVLTVDNALTEIPRIIKVATEEKRPVHVHLPIDIAAKEIEVPDDVAYPATQKAENVSTVVEKLTERLKAAQQVTLIVGHQINSYGLQKDVQAIAEKLNLPVAQLSLGKGSFNEESAQYMGVYDGYIAEDNIRDYVDGSDLVITLGAKLTDSATAGFSQKFSNDTIVTLNHRDVKVGDYTTTEPSLPEIVEAFKNIDFKYGGDFPQYQWPDVSAAVYNDEPLTQENYFNLMQNFLRKGDVILGEQGTSFFGAYRLALQEGTTFIGQPLWGSIGYTLPSTLGTLLAAPERRHVLLIGDGSLQLTAQEMSTMVRQNLNPVIFIINNDGYTVEKKIHGENAKYNDIQMWDYKLLPALFGNKDIPTYDVKTSNDLKVAMDQIDQNPDTMHVVEVHMDVLDAPANLNEISKAFAAQNK

SEQ ID NO: 46 - protein, 548 aa, Staphylococcus pseudintermedius
MMKKRIGQFLIDEIAKQGVDKIFGVPGDFNLTFLDDIEAHETLEWVGNTNELNASYAADGYARLNGLAAMVTTFGVGELSAVNGIAGSYAENVPVIQITGAPTTVVEQAGKYVHHSLGNGKFDDYQKMYAQITETQTVLTVDNALTEIPRIIKVATEEKRPVHVHLPIDIAAKEIEVPDDVAYPATQKAENVSTVVEKLTERLKAAQQVTLIVGHQINSYGLQKDVQALAEKLNLPVAQLSLGKGAFNEESAQYMGVYDGYIAEDNIRDYVDGSDLVITLGAKLTDSATAGFSQKFSNDTIVTLNHRDVKVGDYTTTEPSLPEIVEAFKNIDFKYGGDFPQYQWPDVSAAVYNDEPLTQENYFNLIQNFLRKGDVILGEQGTSFFGAYRLALQEGTTFIGQPLWGSIGYTLPSTLGTLLAAPERRHVLLIGDGSLQLTAQEMSTMVRQNLNPVIFIINNDGYTVEKKIHGENAKYNDIQMWDYKLLPALFGNKDIPTYDVKTSNDLKVAMDQIDQNPDTMHVVEVHMDVLDAPANLNEISKAFAAQNK

SEQ ID NO: 47 - protein, 554 aa, Clostridium acetobutylicum
MKSEYTIGRYLLDRLSELGIRHIFGVPGDYNLSFLDYIMEYKGIDWVGNCNELNAGYAADGYARINGIGAILTTFGVGELSAINAIAGAYAEQVPVVKITGIPTAKVRDNGLYVHHTLGDGRFDHFFEMFREVTVAEALLSEENAAQEIDRVLISCWRQKRPVLINLPIDVYDKPINKPLKPLLDYTISSNKEAACEFVTEIVPIINRAKKPVILADYGVYRYQVQHVLKNLAEKTGFPVATLSMGKGVFNEAHPQFIGVYNGDVSSPYLRQRVDEADCIISVGVKLTDSTTGGFSHGFSKRNVIHIDPFSIKAKGKKYAPITMKDALTELTSKIEHRNFEDLDIKPYKSDNQKYFAKEKPITQKRFFERIAHFIKEKDVLLAEQGTCFFGASTIQLPKDATFIGQPLWGSIGYTLPALLGSQLADQKRRNILLIGDGAFQMTAQEISTMLRLQIKPIIFLINNDGYTIERAIHGREQVYNNIQMWRYHNVPKVLGPKECSLTFKVQSETELEKALLVADKDCEHLIFIEVVMDRYDKPEPLERLSKRFANQNN

SEQ ID NO: 48 - protein, 556 aa, Bacillus megaterium
MSSNYTIGHYLLDRLAELGVHHMFGVPGDYNLSFLDEVIDHKEIEWIGNCNELNAAYAADGYARVNGMAALITTFGVGELSAVNGIAGSYAERVPVVKITGTPTTNVMDNGLYVHHTLGNGKFDHFSTMYKEVTVAQTFLTQENAAQEIDRVLLTCWTDKRPVHINLPTDVYDKPISKPYNSLLDSAILSNEETLKQMIVDVPERINSAKRPVILADFEVTRYRAQKALLQFAEKTGFPVATLSMGKSAFNEAHPQFIGVYNGDLSSSYVQKRIDQSDCIISVGVKLTDSITGGFSHQFSKDNVIHIHPFSVQFNSTKYAPATMIDSLHALSSAITKRKAEDLDILSLTSQMAAKSYTAAETEITQERFFERIAAFLHENDVLLAEQGTSFFGAATMPLPKDTTFIGQPLWGSIGYTLPALLGSQLADKNRRNVLLIGDGSFQLTAQELSTMLRQHIKPVIFLINNDGYTVERAIHGENQVYNDIQMWNYQELPAVLGPKDRSITFKVRTEIELEEALILAEQNYQHLVFIEVMMHRDDKPALLAELSKRFANQNV

SEQ ID NO: 49 - protein, 558 aa, Bacillus thuringiensis
MKKQYTVSTYLLDRLHELGIEHIFGVPGDYNLAFLDDVVAHENLKWIGNCNELNAAYAADGYARIKRIAALITTFGVGELSAINGIAGSYAENVPVIKITGTPPTKVMENGAIVHHTLGDGKFDHFSNMYREITVAQTNVKPEHAAEEIDRVLRACWNEKRPVHINLPIDVYNKPINKPTEPILYKPILSNKEALDKMLLHATSIINNAKKPVILADFEVDRFHAKENLHQFVEKTGFPIATLSMGKGIFPEKHPQFIGIYTGDVSSPYLRKRIDESDCIISIGVKLTDTITGGFTQGFTKEQVIEIHPYTVKIIDKKYGPVVMQDVLQHLSDSIEHRNKDTLDVKPFILESSPFTEEFNPKAQMVTQKRFWQQMYHFLQENDVLIVEQGTPFFGSAAIPLPNNTAYVGQPLWGSIGYTLPALLGTQLANLSRRNILIIGDGSFQVTAQELSTILDQNLKPIIFLINNNGYTVERAIHGQNQPYNDIQMWDYNKLSMVFGSEEKSLTFKVENEAELAEVLTNITFNKNQLIFIEVIMSQSDQPELLAKLGKRFGQQNS

SEQ ID NO: 50 - protein, 561 aa, Bacillus cereus
MIHLKKQYTVSTYLLDRLHELGIEHIFGVPGDYNLAFLDDVIAHKSLKWIGNCNELNAAYAADGYARIKGIAALITTFGVGELSAINGIAGSYAENVPVIKITGTPTTKVMENGAIVHHTLGDGKFDHFSNMYREITIAQTNVTPEHAAEEIDRVLRACWNEKRPVHINLPIDVYNKPINKPTEPIINKPILSNKEALNKMLLHAISKINSAKKPVILADFEVDRFHAKESLHQFVEKTGFPIATFSMGKGIFPEKHPQFIGVYTGDVSSPYLRKRIDESDCIISIGVKLTDTITGGFTQGFTKEQVIEIHPYTVKIIDKKYGPVVMQDVLQHLSDSIEHRNKDTLDVKPFILESSPFTEEFNPKAQMVTQKRFWQQMYHFLQENDVLIVEQGTPFFGSAAIPLPNDTAYVGQPLWGSIGYTLPALLGTQLANLSRRNILIIGDGSFQVTAQELSTILRQNLKPIIFLINNNGYTVERAIHGQNQPYNDIQMWDYNKLSMIFGSEEKSLTFKVENEAELAETLANIIFNKNQLIFIEVIMSQSDQPELLAKLGKRFGQQNS

SEQ ID NO: 51 - protein, 561 aa, Bacillus cereus
MIHLKTQYTVSTYLLDRLSELGIEHIFGVPGDYNLAFLDDVIAHENVEWIGNCNELNAAYAADGYARIKGIAALITTFGVGELSAINGIAGSYAENVPVIKITGTPPTTVMENGALVHHTLGDGKFDHFSNMYREITVAQSKLTPEHAAEEIDRVLRACWSAKRPVHIQLPIDVYNKPINKPTEPILHKPVVSNKDALDKMLLHATSKINSAKKPVILADFEVERFHAKEYLYQFVEKTGFPIATLSMGKGIFPEKHPQFIGIYTGDVSSPYLRKRIDESDCIISIGVKLTDTITGGFTQGFMKEQVIEIHPYTVKITDKKYGPVVMKDVLQHLSDLIEHRNGETLDIKPFISESLSITEKFNPKPQMVTQKRFCQQIYHFLQEKDVLLAEQGTPFFGSATIPLPNDTTYVAQPLWGSIGYTLPALLGTQLANLSRRNILIIGDGSFQLTVQELSTILRQNLNPIIFLINNNGYTVERAIHGQNEPYNDIQMWDYTKLANVFGTEEKSLTCKVENEIELQEVLTKISNDKDQLTFVEVVMSQGDQPELLAKLGKRFGQQNS

SEQ ID NO: 52 - protein, 561 aa, Bacillus cereus
MIHLKKQYTVSTYLLDRLHELGIEHIFGVPGDYNLAFLDDVVAHENLKWIGNCNELNAAYAADGYARIKGIAALITTFGVGELSAINGIAGSYAENVPVIKITGTPPTKVMENGAIVHHTLGDGKFDHFSNMYREITVAQTNVKPEHAAEEIDRVLRACWNEKRPVHINLPIDVYNKPINKPTEPIINKPILSNKEALNKMLLHAISQINSAKKPVILADFEVDRFHAKENLHQFVEKTGFPIATLSMGKGIFPEKQPQFIGIYTGDVSSPYLRKRIDESDCIISIGVKLTDTITGGFTQGFTKEQVIEIHPYTVKIIDKKYGPVVMQDVLQHLSDSIEHRNKDTLDVKPFILESSPFTEEFIPKAQMVTQKRFWQQMYHFLQENDVLIVEQGTPFFGSAAIPLPNNTAYVGQPLWGSIGYTLPALLGTQLANLSRRNILIIGDGSFQVTAQELSTILRQNLKPIIFLINNNGYTVERAIHGQNQPYNDIQMWDYNKLSMVFVAEEKSLTFKVENESELAEVLTNITFNKNQLIFIEVIMSQSDQPELLAKLGKRFGQQNS

SEQ ID NO: 53 - protein, 561 aa, Bacillus cereus
MIHLKTQYTVSTYLLDRLSELGIEHIFGVPGDYNLAFLDDVIAHENVEWIGNCNELNAAYAADGYARIKGIAALITTFGVGELSAINGIAGSYAENVPVIKITGTPPTTVMENGALVHHTLGDGKFDHFSNMYREITVAQSKLTPEHAAEEIDHVLRACWSAKRPVHIQLPIDVYNKPINKPTEPILHKPVVSNKDALDKMLLHATSKINSAKKPVILADFEVDRFHAKEYLYQFVEKTGFPIATLSMGKGIFPEKHSQFIGIYTGDVSSPYLRKRIDESDCIISIGVKLTDTITGGFTQDFTKEQVIEIHPYTVKIIDKKYGPVVMKDVLQQLSNVIEHRNEETLDIKPFISESLSITEKFNPKPQMVTQKRFWQQIYHFLQENDVLLAEQGTPFFGSAAIPLPNNTTYVVQPLWGSIGYTLPALLGTQLANVSRRNILITGDGSFQLTVQELSTILRQNLKPIIFLINNNGYTVERAIHGQNEPYNDIQMWDYTKLANVFGSKEKSLTCKVENEIELAEVLTDITLNNKQLTFIEVVMSQGDQPELLAKLGERFGKQNS

SEQ ID NO: 54 - protein, 561 aa, Bacillus cereus
MIHLKKQYTVSTYLLDRLHELGIEHIFGVPGDYNLAFLDDVIAHKSLKWIGNCNELNAAYAADGYARIKGIAALITTFGVGELSAINGIAGSYAENVPVIKITGTPPTKVMENGAIVHHTLGDGKFDHFSNMYREITVAQTNVTPEHAVEEIDRVLRACWNEKRPVHINLPIDVYNKPINKPTEPILYKPILSNKEALDKMLLHATSKIKNAKKPVILADFEVDRFHAKENLHQFVEKTGFPIATLSMGKGIFPEKHPQFIGVYTGDVSSPYLRKRIDESDCIISIGVKLTDTITGGFTQGFTKEQVIEIHPYTVKIIDKKYGPVVMQDVLQHLSDLIEHRNKNTLDIKPFILESSPFTEEFNPKAQMITQKRFWQHIYHFLQENDVLIVEQGTPFFGSAAIPLPNNTAYVGQPLWGSIGYTLPALLGTQLANLSRRNILIIGDGSFQVTAQELSTILRQNLKPIIFLINNNGYTVERAIHGQNQPYNDIQMWDYNKLSMIFGSEEKSLTFKVENEAELAETLANIIFNKNQLIFIEVIMSQSDQPELLAKLGKRFGQQNS

SEQ ID NO: 55 - protein, 561 aa, Bacillus cereus
MIHLKTQYTVSTYLLDRLSELEIEHIFGVPGDYNLAFLDDVVAHEKLEWVGNCNELNAAYAADGYARIKGIAALITTFGVGELSAINGVAGSYAENVPVIKITGTPPTTVMENGALVHHTLGDGKFDHFSNMYREITVAQTNLTPEHAAEEIDRVLRACWSEKRPVHIQLPIDVYNKPINKPTESILHKPVVSNKDALDKMLLHATSKINSARKPVILADFEVARFHAEEYLHQFVEKTGFPIATLSMGKGIFPEKHPQFIGIYTGDVSPSYLRKRIDESDCIISIGVKLTDTITGGFTQGFKKEQVIEIHPYTVKIMDKKYGPVVMKDVLKQLNDLIEHRKEDTLEIKPFISESLPITEEFNPKAQMITQKRFWQQIYHFLQENDVLIAEQGTPFFGSATIPLPNNTTYVAQPLWGSIGYTLPALLGTQLANLSRRNILIIGDGSFQLTVQELSTILRKNLKPIIFLINNNGYTVERAIHGQNEPYNDIQMWDYTKLANVFGTEEKSLTWKVENETELAEVLMNITVNNNQLIFIEVVMSQGDQPELLANLGKRFGMQNS

SEQ ID NO: 56 - protein, 561 aa, Bacillus cereus
MIHLKKQYTVSTYLLDRLHELGIEHIFGVPGDYNLAFLDDVVAHKNLKWIGNCNELNAAYAADGYARIKGIAALITTFGVGELSAINGIAGSYAENVPVIKITGTPPTKVMENGAIVHHTLGDGKFDHFSNMYREITIAQTNVTPEHAAEEIDRVLRACWNEKRPVHINLPIDVYNKPINKPTEPILYKPILSNKETLDKMLLHATSKINSAKKPVILADFEVDRFHAKESLHQFVEKTGFPIATFSMGKGIFPEKHPQFIGVYTGDVSSPYLRKRIDESDCIISIGVKLTDTITGGFTQGFTKEQVIEIHPYTVKIIDKKYGPVVMQDVLQHLSDSIEHRNKDTLDVKPFILESSPFTEEFNPKAQMVTQKRFWQQMYHFLQENDVLIVEQGTPFFGSAAIPLPNNTAYVGQPLWGSIGYTLPALLGTQLANLSRRNILIIGDGSFQVTAQELSTILRQNLKPIIFLINNNGYTVERAIHGQNQLYNDIQMWDYNKLSMVFGSEEKSLTFKVENEAELAEVLTNITFNKNQLIFIEVIMSQSDQPELLAKLGKRFGQQNS

SEQ ID NO: 57 - protein, 561 aa, Bacillus cereus
MIHLKKQYTVSTYLLDRLHELGIEHIFGVPGDYNLAFLDDVVAHENLKWIGNCNELNAAYAADGYARIKGIAALITTFGVGELSAINGIAGSYAENVPVIKITGTPPTKVMENGAIVHHTLGDGKFDHFANMYREITVAQTNVTPEHAAEEIDRVLRACWNEKRPVHINLPIDVYNKPINKPTEPILYKPILSNKEALDKMLLHATSIINNAKKPVILADFEVDRFHAKENLHQFVEKTGFPIATLSMGKGIFPEKHPQFIGIYTGDVSSPYLRKRIDESDCIISIGVKLTDTITGGFTQGFTKEQVIEIHPYTVKIIDKKYGPVVMQDVLQHLSDSIAHRNKDTLEIKPFISAPSPFTEEFNPKAQMVTQKRFWQQMYHFLQENDILIVEQGTPFFGSAAIPLPNNTAYVGQPLWGSIGYTLPALLGTQLANLSRRNILIIGDGSFQVTAQELSTILRQNLKPIIFLINNNGYTVERAIHGQNQPYNDIQMWDYNKLSMVFGSEEKSLTFKVENEAELAEVLTNITFNKNQLIFIEVIMSQSDQPELLAKLGKRFGQQNS

SEQ ID NO: 58 - protein, 561 aa, Bacillus thuringiensis
MIHLKTQYTVSTYLLDRLSELGIEHIFGVPGDYNLAFLDYVLAHKNLEWIGNCNELNAAYAADGYARIKGIAALITTFGVGELSAINGIAGSYAENVPVIKITGTPPTTVMENGELVHHTLGDGKFNHFSKMYREITIAQTNLTPEHAVEEIDRVLRACWNEKRPVHINLPIDVYNKPINRPAEPILHKPILSNKETLNKMLLHAISKINSAKKPIILADFEVDRFHAKEYLYQFVEKTGFPIATLSMGKGIFPEKHPQFIGVYVGDVSPPYLRKRIDESDCIISIGVKLTDTITGGFTQGFTKEQVIEIHPYTVKITDKKYGPVVMKDVLQQLSDVIKHRNEETLDIKPFISESLSMTEEFNPKAHMVTQKRFWQQIYHFLQENDVLLAEQGTPFFGSAAIPLPNNTTYVAQPLWGSIGYTLPALLGTQLANLSRRNILLIGDGSFQLTVQELSTILRQNLKPIIFLINNNGYTVERAIHGQNEPYNDIQMWEYTKLANVFGTEEKSQTFKVQNETELQEVLTKISIDKNQLTFVEIVMSQGDQPELLTKLGKRFGQQNS

SEQ ID NO: 59 - protein, 561 aa, Bacillus cereus
MIHLKTQYTVSTYLLDRLSELGIEHIFGVPGDYNLAFLDYVLAHKNLEWIGNCNELNAAYAADGYARIKGIAALITTFGVGELSAINGIAGSYAENVPVIKITGTPPTTVMENGELVHHTLGDGKFNHFSKMYREITIAQTNLTPEHAVEEIDRVLRACWNEKRPVHINLPIDVYNKPINRPAEPILHKPILSNKETLDKMLLHAISKINSAKKPIILADFEVDRFHAKEYLYQFVEKTGFPIATLSMGKGIFPEKHPQFIGIYTGDVSSPYLRKRIDESDCIISIGVKLTDTITGGFTQGFTKEQVIEIHPYTVKITDKKYGPVVMKDVLQQLSDVIEHRNEETLDIKPFISESLSMTEEFNPKAQMVTQKRFWQQIYHFLQENDVLLAEQGTPFFGSAAIPLPNDTTYVAQPLWGSIGYTLPALLGTQLANLSRRNILIIGDGSFQLTVQELSTMLRQNLKPIIFLINNNGYTVERAIHGQIEPYNDIQMWEYTKLANVFGTEEKSQTFKVENETELQEVLTKISIDKDQLTFVEVVMSQGDQPELLAKLGKRFGQQNS

SEQ ID NO: 60 - protein, 561 aa, Bacillus cereus
MIHLKTQYTVSTYLLDRLRELGIEHIFGVPGDYNLAFLDDVLAHEKLKWIGNCNELNAAYTADGYARIKGIAALITTFGVGELSALNGVAGSYAENVPVIKITGTPPTTVMENGALVHHTLGDGKFDHFSNMYREITVAQSKLTPEHAAEEIDRVLRACWSEKRPVHIQLPIDVYNKPINKPTEPILHKPVLSNKDALDKMLLHATSKINSAKKPVILADFEVARFHAEEYLHQFVEKTGFPIATLSMGKGIFPEKHPQFIGIYTGDVSSPYLRKRIDESDCIISIGVKLTDTITGGFTQGFMKEQVIEIHPYTVKIIDKTYGPIVMKDVLEQLSDLIEHRIEETLEIKPFISESLSITEEFNPKAQMVTQKRFWQQIYHFLLENDVLIAEQGTPFFGSAAIPLPNNTTYVAQPLWGSIGYTLPALLGTQLADLSRRNILIIGDGSFQLTVQELSTILRQNLKPIIFLINNNGYTVERAIHGQNEPYNDIQMWDYTKLANVLGSEEKSLTYKVENEIELAEVLTNISLNKNQLIFIEVVMSQGDQPELLAKLGERFGKQNS

SEQ ID NO: 61 - protein, 561 aa, Bacillus thuringiensis
MIHLKKQYTVSTYLLDRLHELGIEHIFGVPGDYNLAFLDDVVAHKNLKWIGNCNELNAAYAADGYARIKGIAALITTFGVGELSAINGIAGSYAENVPVIKITGTPPTKVMENGAIVHHTLGDGKFDHFSNMYREITIAQTNVTPEHAAEEIDRVLRACWNEKRPVHINLPIDVYNKPINKPTEPILYKPILSNKETLDKMLLHATSIINNAKKPVILADFEVDRFHAKESLHQFVEKTGFPIATFSMGKGIFPEKHPQFIGVYTGDVSSPYLRKRIDESDCIISIGVKLTDTITGGFTQGFTKEQVIEIHPYTVKIIDKKYGPVVMQDVLQHLSDSIEHRNKDTLDVKPFILETSPFTEEFNPKAQMVTQKRFWQQMYHFLQENDVLIVEQGTPFFGSAAIPLPNNTAYVGQPLWGSIGYTLPALLGTQLANLSRRNILIIGDGSFQVTAQELSTILRQNLKPIIFLINNNGYTVERAIHGQNQLYNDIQMWDYNKLSMIFGSEEKSLTFKVENEAELAETLVNIIFNKNQLIFIEVIMSQSDQPELLAKLGKRFGQQNS

SEQ ID NO: 62 - protein, 561 aa, Bacillus cereus
MIHLKKQYTVSTYLLDRLHELGIEHIFGVPGDYNLAFLDDVVAHKNLKWIGNCNELNAAYAADGYARIKGIAALITTFGVGELSAINGIAGSYAENVPVIKITGTPPTKVMENGAIVHHTLGDGKFDHFSNMYREITVAQTNVTPEHAVEEIDRVLRACWNEKRPVHINLPIDVYNKPINKPTEPILYKPILSNKEALDKMLLHATSKIKNAKKPVILADFEVDRFHAKENLHQFVEKTGFPIATLSMGKGIFPEKHPQFIGVYTGDVSSPYLRKRIDESDCIISIGVKLTDTITGGFTQGFTKEQVIEIHPYTVKIIDKKYGPVVMQDVLQHLSDSIEHRNKDTLEIKPFILESSPFTEEFNPKAQMVTQKRFWQQMYHFLQENDVLIVEQGTPFFGSADIPLPNNTAYVGQPLWGSIGYTLPALLGTQLANLSRRNILIIGDGSFQVTAQELSTILRQNLKPIIFLINNNGYTVERAIHGQNQLYNDIQMWDYNKLSMVFGSEEKSLTFKVENEAELAEVLTNITFNKNQLIFIEVIMSQSDQPELLAKLGKRFGQQNS

SEQ ID NO: 63 - protein, 558 aa, Bacillus cereus
MKKQYTISAYLLDRLHELGIEHIFGVPGDYNLAFLDDVVAHENLKWIGNCNELNAAYAADGYARIKGIAALITTFGVGELSAINGIAGSYAENVPVIKITGTPPTKVMENGAIVHHTLGDGKFDHFSNMYREITIAQTNVTPEHAAEEIDRVLRACWNEKRPVHINLPIDVYNKPINKPTEPIINKPILSNKEALNKMLLHAISKINSAKKPVILADFEVDRFHAKENLHQFVEKTGFPIATLSMGKGIFPEKQPQFIGVYTGDVSSPYLRKRIDESDCIISIGVKLTDTITGGFTQGFTKEQVIEIHPYTVKIIDKKYGPVVMQDVLQHLSDSIEHRNKDTLDVKPFILESSPFTEEFIPKAQMVTQKRFWQQMYHFLQENDVLIVEQGTPFFGSAAIPLPNNTAYVGQPLWGSIGYTLPALLGTQLANLSRRNILIIGDGSFQVTAQELSTVLRHNLKPIIFLINNNGYTVERAIHGQNQPYNDIQIWDYNKLSMVFGAEEKSLTFKVENESELAEVLTNITFNKNQLIFIEVIMSQSDQPELLAKLGKRFGQQNS

SEQ ID NO: 64 - protein, 561 aa, Bacillus thuringiensis s
MIHLKKQYTVSTYLLDRLHELGIEHIFGVPGDYNLAFLDDVVAHENLKWIGNCNELNAAYAADGYARIKRIAALITTFGVGELSAINGIAGSYAENVPVIKITGTPPTKVMENGAIVHHTLGDGKFDHFSNMYREITVAQTNVKPEHAAEEIDRVLRACWNEKRPVHINLPIDVYNKPINKPTEPILYKPILSNKEALDKMLLHATSIINNAKKPVILADFEVDRFHAKENLHQFVEKTGFPIATLSMGKGIFPEKHPQFIGIYTGDVSSPYLRKRIDESDCIISIGVKLTDTITGGFTQGFTKEQVIEIHPYTVKIIDKKYGPVVMQDVLQHLSDSIEHRNKDTLDVKPFILESSPFTEEFNPKAQMVTQKRFWQQMYHFLQENDVLIVEQGTPFFGSAAIPLPNNTAYVGQPLWGSIGYTLPALLGTQLANLSRRNILIIGDGSFQVTAQELSTILDQNLKPIIFLINNNGYTVERAIHGQNQPYNDIQMWDYNKLSMVFGSEEKSLTFKVENEAELAEVLTNITFNKNQLIFIEVIMSQSDQPELLAKLGKRFGQQNS

SEQ ID NO: 65 - protein, 561 aa, Bacillus thuringiensis
MIHLKTHYTVSTYLLDRLSELGIEHIFGIPGDYNLAFLDDVIAHEKLEWIGNCNELNAAYAADGYARIKGIAALITTFGVGELSAINGIAGSYAENVPVIKITGTPTTTVMENGELVHHTLGDGKFNHFSNMYREITVAQTNLTPEHAVEEIDRVLRACWNEKRPVHINLPIDVYNKPINKPAGPILHKPILSNKETLDKMLLHAISKINSAKKPIILADFEVDRFHAKEYLYQFVEKTGFPIATLSMGKGIFPEKHPQFIGIYTGDVSSPYLRKRIDESDCIISIGVKLTDTITGGFTQGFTKEQVIEIHPYTVKITDKKYGPVVMKDVLQQLSDVIEHRNEETLDIKPFISESLSMTEEFNPKAQMVTQKRFWQQIYHFLQENDVLLAEQGTPFFGSAAIPLPNDTTYVAQPLWGSIGYTLPALLGTQLANLSRRNILIIGDGSFQLTVQELSTMLRQNLKPIIFLINNNGYTVERAIHGQIEPYNDIQMWEYTKLANVFGTEEKSQTFKVENETELQEVLTKISIDKDQLTFVEVVMSQGDQPELLAKLGKRFGQQNS

SEQ ID NO: 66 - protein, 558 aa, Bacillus cereus
MKKQYTVSTYLLDRLHELGIEHIFGVPGDYNLAFLDDVVAHENLKWIGNCNELNAAYAADGYARIKGIAALITTFGVGELSAINGIAGSYAENVPVIKITGTPPTKVMENGAIVHHTLGDGKFDHFSNMYREITVAQTNVTPEHAAEEIDRVLRACWNEKRPVHINLPIDVYNKPINKPTEPIINKPILSNKEALNKMLLHAISKINSAKKPVILADFEVDRFHAKENLHQFVEKTGFPIATLSMGKGIFPEKHPQFIGIYTGDVSSPYLRKRIDESDCIISIGVKLTDTITGGFTQGFTKEQVIEIHPYTVKIIDKKYGPVVMQDVLQHLSDSIEHRNKDTLDVKPFILESSPFTEEFIPKAQMVTQKRFWQQMYHFLQENDVLIVEQGTPFFGSSAIPLPNNTAYVGQPLWGSIGYTLPALLGTQLANLSRRNILIIGDGSFQVTAQELSTILRQNLKPIIFLINNNGYTVERAIHGQNQLYNDIQMWDYNKLSMVFGAEEKSLTFKVENEAELAAVLTNITFNKNQLIFIEVIMSQSDQPELLAKLGKRSGQQNS

SEQ ID NO: 67 - protein, 561 aa, Bacillus thuringiensis
MIHLKTHYTVSTYLLDRLSELGIEHIFGFPGDYNLAFLDDVIAHEKLEWIGNCNELNAAYAADGYARIKGIAALITTFGVGELSAINGIAGSYAENVPVIKITGTPPTTVMENGELVHHTLGDGKFDHFSKMYREITIAQTNLTPEHAVEEIDRVLRACWNEKRPVHINLPIDVYNKPINKPAEPILHKPILSNKETLDKMLLHAISKINSAKKPIILADFEVDRFHAKEYLYQFVEKTGFPIATLSMGKGIFPEKHPQFIGIYTGDVSSPYLRKRIDESDCIISIGVKLTDTITGGFTQGFTKEQVIEIHPYTVKITDKKYGPVVMKDVLQQLSDVIEHRNEETLDIKPFISESLSMTEEFNPKAHMVTQKRFWQQMSHLLQENDVLLAEQGTPFFGSAAIPLPNNTTYVAQPLWGSIGYTLPALLGTQLANLSRRNILIIGDGSFQLTVQELSTILRQNLNPIIFLINNNGYTVERAIHGQNEPYNDIQMWDYTKLANVFGTKEKSQTFKVENETELQEVLTKISIDKNQLTFVEIVMSQGDQPELLAKLGKRFGQQNS

SEQ ID NO: 68 - protein, 558 aa, Bacillus anthracis
MKTQYTVSTYLLDRLSELGIEHIFGIPGDYNLAFLDYVLAHKNLEWIGNCNELNAAYAADGYARIKGIAALITTFGVGELSAINGIAGSYAENVPVIKITGTPPTTVMENGELVHHTLGDGKFNHFSKMYREITIAQTNLTPEHAVEEIDRVLRACWNEKRPVHINLPIDVYNKPINRPAEPILHKPILSNKETLDKMLLHAISKINSAKKPIILADFEVDRFHAKEYLYQFVEKTGFPIATLSMGKGIFPEKHPQFIGVYVGDVSPPYLRKRIDESDCIISIGVKLTDTITGGFTQGFTKEQVIEIHPYTVKITDKKYGPVVMKDVLQQLSDVIEHRNEETLDIKPFISESLSMTEEFNPKAHMVTQKRFWQQIYHFLQENDVLLAEQGTPFFGSAAIPLPNNTTYVAQPLWGSIGYTLPALLGTQLANLSRRNILIIGDGSFQLIVQELSTILRQNLNPIIFLINNNGYTVERAIHGQNEPYNDIQMWEYTKLAKVFGTEEKSQTFKVQNETELQEVLTKISIDKNQLTFVEIVMSQGDQPELLAKLGKRFGQQNS

SEQ ID NO: 69 - protein, 561 aa, Bacillus cereus
MIHLKTQYTVSTYLLDRLSELGIEHIFGVPGDYNLAFLDDVIAHENVEWIGNCNELNAAYAADGYARIKGIGALITTFGVGELSAINGIAGSYAENVPVIKITGTPTTKVMENGALVHHTLGDGKFDHFSKMYREITVAQTNLTPEHAAEEIDRVLRACWNEKRPVHINLPIDVYNKPINKPTEPILHKPILSNKETLDKMLLHAISKINSAKKPVILADFEVDRFHAKEYLYQFVEKTGFPIATLSMGKGIFPEKHPQFIGIYTGDVSSPYLRKRIDESDCIISIGVKLTDTITGGFTQGFTKEQVIEIHPYTVKITDKKYGPVVMKDVLQQLSNVIEHRNEETFDIKPFISESLSITEKFNPKPQMVTQKRFWQQIYHFLQENDVLLAEQGTPFFGSAAIPLPNDTTYVAQPLWGSIGYTLPALLGTQLANLSRRNILIIGDGSFQLTVQELSTILRQNLNPIIFLINNNGYTVERAIHGQNEPYNDIQMWDYTKLANVFGTEEKSLTCTVENEIELQEVLTKISIDKDQLTFVEVVMSQGDQPELLAKLGKRFGQQNS

SEQ ID NO: 70 - protein, 561 aa, Bacillus cereus
MILLKTQYTVSTYLLDRLHELGIEHIFGVPGDYNLAFLDDVIAHENLEWIGNCNELNAAYAADGYARIKGVATLITTFGVGELSAINGIAGSYAENVPVIKITGTPTTTVIENGELVHHTLGDGKFDHFSNMYREITVAQTNLIPEHAAEEIDRVLRACWNEKRPVHINLPIDVYNKPINKPTEPILNHPIVSNKDALDKMLLHATSKINSAKKPVILADFEVDRFHAQEDLHQLVEKTGFPIATLSMGKGIFPEKHPQFIGVYTGDVSPPYLRKRVDESDCIISIGVKLTDTITGGFTQGFTKEQVIEIHPYTVKIIDKKYGPVVMKDVLQHLSDSIEHRNEETLEIKSFISESSSITKEFNPKAQIVTQQRFWQQLYHFLQENDVLIAEQGTPYFGSAAIPLPNNATFVGQPLWGSIGYTLPALLGTQLANVTRRNILIIGDGSFQLTVQELSTMLRHNLKPIIFLINNYGYTVERAIHGRDQPYNDIQMWDYNKLPNVFGSEEKSLTFKVENEIELAEVLNKISFNMNRLIFIEVVMSQGDQPELLAKLGKRFGSQNS

SEQ ID NO: 71 - protein, 561 aa, Bacillus thuringiensis
MIHLKKQYTVSTYLLDRLHELGIEHIFGVPGDYNLAFLDDVVAHENLKWIGNCNELNAAYAADGYARIKGIAALITTFGVGELSAINGIAGSYAENVPVIKITGTPPTKVMENGAIVHHTLGDGKFDHFSNMYREITVAQTNVTPEHAAEEIDRVLRACWNEKRPVHINLPIDVYNKPINKPTEPILYKQILSNKEALDKMLLHATSKIKNAKKPVILADFEVDRFHAKENLHQFVEKTGFPIATLNMGKGIFPEKHPQFIGVYTGDVSSPYLRKRIDESDCIISIGVKLTDTITGGFTQGFTKEQVIEIHPYTVKIIDKKYGPVVMKDVLQQLSDVIEHRNEETLDIKPFISESLSITEEFNPKEQMITQKRFWQQIYHFLHENDILIAEQGTPFFGSATIPLPNNTTYVAQPLWGSIGYTLPALLGTQLANLSRRNILVIGDGSFQLTVQELSTILRQNLKPIIFLINNNGYTVERAIRGQNQPYNDIQMWDYTKLTNVFGTEEKSQTFKVENETELAEVLTNITFNKNQLIFIEVIMSQSDQPELLAKLGKRFGQQNS

SEQ ID NO: 72 - protein, 558 aa, Bacillus cereus
MKTQYTVSTYLLDRLSELGIEHIFGVPGDYNLAFLDYVLAHKNLEWIGNCNELNAAYAADGYARIKGIAALITTFGVGELSAINGIAGSYAENVPVIKITGTPTTTVMENGELVHHTLGDGKFNHFSNMYREITVAQTNLTPEHAVEEIDRVLRACWNEKRPVHINLPIDVYNKPINKPAGPILHKPILSNKETLDKMLLHAISKINSAKKPIILADFEVDRFHAKEYLYQFVEKTGFPIATLSMGKGIFPEKHPQFIGIYTGDVSSPYLRKRIDESDCIISIGVKLTDTITGGFTQGFTKEQVIEIHPYTVKITDKKYGPVVMKDVLQQLSDVIEHRNEETLDIKPFISESLSMTEEFNPKAQMVTQKRFWQQIYHFLQENDVLLAEQGTPFFGSAAIPLPNDTTYVAQPLWGSIGYTLPALLGTQLANLSRRNILIIGDGSFQLTVQELSTMLRQNLKPIIFLINNNGYTVERAIHGQIEPYNDIQMWEYTKLANVFGTEEKSQTFKVENETELQEVLTKISIDKDQLTFVEVVMSQGDQPELLAKLGKRFGQQNS

SEQ ID NO: 73 - protein, 561 aa, Bacillus cereus
MIHLKKQYTVSTYLLDRLHELGIEHIFGVPGDYNLAFLDDVVAHENLKWIGNCNELNAAYAADGYARIKGIAALITTFGVGELSAINGIAGSYAENVPVIKITGTPPTKVMENGAIVHHTLGDGKFDHFSNMYREITVAQTNVTPEHAAEEIDRVLRACWNEKRPVHINLPIDVYNKPINKPTEPIINKPILSNKEALNKMLLHAISKINSAKKPVILADFEVDRFHAKENLHQFVEKTGFPIATLSMGKGIFPEKHPQFIGIYTGDVSSPYLRKRIDESDCIISIGVKLTDTITGGFTQGFTKEQVIEIHPYTVKIIDKKYGPVVMQDVLQHLSDSIEHRNKDTLDVKPFILESSPFTEEFIPKAQMVTQKRFWQQMYHFLQENDVLIVEQGTPFFGSSAIPLPNNTAYVGQPLWGSIGYTLPALLGTQLANLSRRNILIIGDGSFQVTAQELSTILRQNLKPIIFLINNNGYTVERAIHGQNQLYNDIQMWDYNKLSMVFGAEEKSLTFKVENEAELAAVLTNITFNKNQLIFIEVIMSQSDQPELLAKLGKRSGQQNS

SEQ ID NO: 74 - protein, 561 aa, Bacillus cereus
MIHLKTQYTVSTYLLDRLSELGIEHIFGVPGDYNLAFLDDVVAHEKLKWVGNCNELNAAYAADGYARIKGIAALITTFGVGELSAINGVAGSYAENVPVIKITGTPTTKVMENGALVHHTLGDGKFDHFSNMYREITVAQTNLTAEHAAEEIDRVLRACWSEKRPVHINLPIDVYNKPINKPTESILHKPVVSNKEALDKMLIHATSKINSAKKPVILADFEVNRFHAEEYLYQFVKKTGFPIATLSMGKGIFPEKHPQFVGIYTGDVSSAYLRKRIDESDCIISIGVKLTDTITGGFTQGFTKGQVIEIHPYTVKIIDKTYGPVVMKDALEQLSDLIEHRIEETLEIKPFISESLSITEEFNPKAQLVTQKRFWQQIYHFLQENDVLIAEQGTPFFGSAAIPLPNNTTYVAQPLWGSIGYTLPALLGTQLADLSRRNILIIGDGSFQLTVQELSTILRQNLKPIIFLINNNGYTVERAIHGQNQLYNDIQMWDYTKLANVLGSEEKSLTYKVENETELAEVLTNISLNKNQLIFIEVVMSQGDQPELLAKLGERFGKQNS

SEQ ID NO: 75 - protein, 558 aa, Bacillus cereus
MKKQYTVSTYLLDRLHELGIEHIFGVPGDYNLAFLDDVVAHKNLKWIGNCNELNAAYAADGYARIKGIAALITTFGVGELSAINGIAGSYAENVPVIKITGTPPTKVMENGAIVHHTLGDGKFDHFSNMYREITIAQTNVTPEHAAEEIDRVLRACWNEKRPVHINLPIDVYNKPINKPTEPIINKPILSNKEALNKMLLHAISKINSAKKPVILADFEVDRFHAKESLHQFVEKTGFPIATFSMGKGIFPEKHPQFIGVYTGDVSSPYLRKRIDESDCIISIGVKLTDTITGGFTQGFTKEQVIEIHPYTVKIIDKKYGPVVMQDVLQHLSDSIEHRNKDTLDVKPFILESSPFTEEFNPKAQMVTQKRFWQQMYHFLQENDVLVVEQGTPFFGSAAIPLPNNTAYVGQPLWGSIGYTLPALLGTQLANLSRRNILIIGDGSFQVTAQELSTILRQNLKPIIFLINNNGYTVERAIHGQNQLYNDIQMWDYNKLSMVFGSEEKSLTFKVENEAELAEVLTNITFNKNQLIFIEVIMSQSDQPELLAKLGKRFGQQNS

SEQ ID NO: 76 - protein, 561 aa, Bacillus thuringiensis
MIHLKTHYTVSTYLLDRLSELGIEHIFGIPGDYNLAFLDDVIAHEKLEWIGNCNELNAAYAADGYARIKGIAALITTFGVGELSAINGIAGSYAENVPVIKITGTPTTTVMENGELVHHTLGDGKFNHFSNMYREITVAQTNLTPEHAVEEIDRVLRACWNEKRPVHINLPIDVYNKPINKPAGPILHKPILSNKETLDKMLLHAISKINSAKKPIILADFEVDRFHAKEYLYQFVEKTGFPIATLSMGKGIFPEKHPQFIGIYTGDVSSPYLRKRIDESDCIISIGVKLTDTITGGFTQGFTKEQVIEIHPYTVKITDKKYGPVVMKDVLQQLSDVIEHRNEETLDIKPFISESLSMTEEFNPKAQMVTQKRFWQQIYHFLQENDVLLAEQGTPFFGSAAIPLPNDTTYVAQPLWGSIGYTLPALLGTQLANLSRRNILIIGDGSFQLTVQELSTMLRQNLKPIIFLINNNGYTVERAIHGQIEPYNDIQMWEYTKLANVFGTEEKSQTFKVENETELQEVLTKISIDKDQLTFVEVVMSQGDQPGLLAKLGKRFGQQNS

SEQ ID NO: 77 - protein, 561 aa, Bacillus thuringiensis
MIHLKTQYTVSTYLLDRLSELGIEHIFGVPGDYNLAFLDDVIAHENVEWIGNCNELNAAYAADGYARIKGIAALITTFGVGELSAINGIAGSYAENVPVIKITGTPPTTVMENGALVHHTLGDGKFDHFSNMYREITVAQSKLTPEHAAEEIDRVLRACWSAKRPVHIQLPIDVYNKPINKPTEPILHKPVVSNKDALDKMLLHATSKINSAKKPVILADFEVERFHAKEYLYQFVEKTGFPIATLSMGKGIFPEKHSQFIGVYTGDVSSPYLRKRIDESDCIISIGVKLTDTITGGFTQGFTKEQVIEIHPYTVKIIDKKYGPVVMKDVLQQLSDLIEHRNKNDLEIKPFLSESSSFTEEFNPKAQMVTQKRFWQQIYHFLQENDVLIAEQGTPFFGSTAIPLPNNTTYVAQPLWGSIGYTLPALLGTQLANLSRRNILIIGDGSFQLTVQELSTILRQNLNPIIFLINNNGYTVERAIHGQNEPYNDIQMWDYTKLANVFGSKEKSLTCKVENEIELEEVLTKISIDKNQLAFVEVVMSQGDQPELLAKLGKRFGQQNS

SEQ ID NO: 78 - protein, 561 aa, Bacillus cereus
MILLKTQYTVSTYLLDRLYELGIEHIFGVPGDYNLAFLDDVIAHKNLEWIGNCNELNAAYAADGYARIKGVAALITTFGVGELSAINGIAGSYAENVPVIKITGTPTTTVMENGELVHHTLGDGKFDHFSNMYREITIAQTNLIPEHAAEEIDRVLRACWNEKRPVHINLPIDVYNKPINKPTEPILNHPIVSNKDALDKMLLHAISKINSAKKPVILADFEVNRFYAEEDLHQLVEKTGFPIASLSMGKGIFPEKHPQFIGIYTGDVSPPYLRKRVDESDCIISIGVKLTDTITGGFTQGFTKEQVIEIHPYTVKIIDKKYGPVVMKDVLQYLINSIKHRNEETFEIKPFISESSSITKEFNPKAQIVTQQRFWQQLYHFLQENDVLIAEQGTPYFGSATIPLPNNASFVGQPLWGSIGYTLPALLGTQLANVTRRNILIIGDGSFQLTVQELSTMLRHNLKPIIFLINNNGYTVERAIHGRDQPYNDIQMWDYNKLPNVFGSEEKSLTFKVENEIELAEVLNKISFNMNRLIFIEVVMSQGDQPELLAKLGKRFGIQNS

SEQ ID NO: 79 - protein, 561 aa, Bacillus cereus
MIHLKKQYTVSTYLLDRLHELGIEHIFGVPGDYNLAFLDDVIAHKSLKWIGNCNELNAAYAADGYARIKGIAALITTFGVGELSAINGIAGSYAENVPVIKITGTPPTKVMENGAIVHHTLGDGKFDHFSNMYREITIAQTNVTPEHAAEEIDRVLRACWNEKRPVHINLPIDVYNKPINKPTEPIINKPILSNKEALNKMLLHAISKINSAKKPVILADFEVDRFHAKESLHQFVEKTGFPIATFSMGKGIFPEKHPQFIGVYTGDVSSPYLRKRIDESDCIISIGVKLTDTITGGFTQGFTKEQVIEIHPYTVKIIDKKYGPVVMQDVLQHLSDSIEHRNKDTLDVKPFILESSPFTEEFNPKAQMVTQKRFWQQMYHFLQENDVLIVEQGTPFFGSAAIPLPNDTAYVGQPLWGSIGYTLPALLGTQLANLSRRNILIIGDGSFQVTAQELSTILRQNLKPIIFLINNNGYTVERAIHGQNQPYNDIQMWDYNKLSMIFGSEEKSLTFKVENEAELAEVLTNIIFNKNQLIFIEVIMSQSDQPELLAKLGKRFGQQNS

SEQ ID NO: 80 - protein, 561 aa, Bacillus cereus
MIHLKKQYTVSTYLLDRLHELGIEHIFGVPGDYNLAFLDDVVAHENLKWIGNCNELNAAYAADGYARIKGIAALITTFGVGELSAINGIAGSYAENVPVIKITGTPPTKVMENGAIVHHTLGDGKFDHFSNMYREITVAQTNVTPEHAAEEIDRVLRACWNEKRPVHINLPIDVYNKPINKPTEPILYKPILSNKEALDKMLLHATSIINNAKKPVILADFEVDRFHAKENLHQFVEKTGFPIATLSMGKGIFPEKHPQFIGIYTGDVSSPYLRKRIDESDCIISIGVKLTDTITGGFTQGFKKEQVIEIHPYTVKIIDKKYGPVVMQDVLQHLSDSIEHRNKDTLDVKPFILESSPFTEEFIPKAQMVTQKRFWQQMYHFLQENDVLIVEQGTPFFGSAAIPLPNNTAYVGQPLWGSIGYTLPALLGTQLANLSRRNILIIGDGSFQVTAQELSTILRQNLKPIIFLINNNGYTVERAIHGQNQPYNDIQMWDYNKLSMVFGAEEKSLTFKVENESELAEVLTNITFNKNQLIFIEVIMSQSDQPELLAKLGKRFGQQNS

SEQ ID NO: 81 - protein, 561 aa, Bacillus anthracis
MIHLKTQYTVSTYLLDRLSELGIEHIFGIPGDYNLAFLDYVLAHKNLEWIGNCNELNAAYAADGYARIKGIAALITTFGVGELSAINGIAGSYAENVPVIKITGTPPTTVMENGELVHHTLGDGKFNHFSKMYREITIAQTNLTPEHAVEEIDRVLRACWNEKRPVHINLPIDVYNKPINRPAEPILHKPILSNKETLDKMLLHAISKINSAKKPIILADFEVDRFHAKEYLYQFVEKTGFPIATLSMGKGIFPEKHPQFIGVYVGDVSPPYLRKRIDESDCIISIGVKLTDTITGGFTQGFTKEQVIEIHPYTVKITDKKYGPVVMKDVLQQLSDVIEHRNEETLDIKPFISESLSMTEEFNPKAHMVTQKRFWQQIYHFLQENDVLLAEQGIPFFGSAAIPLPNNTTYVAQPLWGSIGYTLPALLGTQLANLSRRNILIIGDGSFQLIVQELSTILRQNLNPIIFLINNNGYTVERAIHGQNEPYNDIQMWEYTKLAKVFGTEEKSQTFKVQNETELQEVLTKISIDKNQLTFVEIVMSQGDQPELLAKLGKRFGQQNS

SEQ ID NO: 82 - protein, 561 aa, Bacillus cereus
MIHLKTQYTVSTYLLDRLSELGIEHIFGVPGDYNLAFLDDVLAHKNLEWIGNCNELNAAYAADGYARIKGIGALITTFGVGELSAINGIAGSYAENVPVIKITGTPTTTVMENGELVHHTLGDGKFNHFSNMYREITVAQTNLTPEHAVEEIDRVLRACWNEKRPVHINLPIDVYNKPINKPAEPILHKPILSNKETMDKMLLHAISKINSAKKPIILADFEVDRFHAKEYLYQFVEKTGFPIATLSMGKGIFPEKHPQFIGIYTGDVSFPYLRKRIDESDCIISIGVKLTDTITGGFTQGFTKEQVIEIHPYTVKITDKKYGPVVMKDVLQQLSDIIKHRNEETLDIKPFISESLSMTEEFNPKAHMVTQKRFWQQIYHFLQENDVLLAEQGTPFFGSAAIPLPNNTTYVAQPLWGSIGYTLPALLGTQLANLSRRNILIIGDGSFQLTVQELSTMLRQNLKPIIFLINNNGYTVERAIHGQNEPYNDIQMWEYTKLANVFGTEEKSQTFKVENETELQEVLTKISIDKDQLTFVEVVMSQGDQPELLAKLGKRFGQQNS

SEQ ID NO: 83 - protein, 558 aa, Bacillus cereus
MKTQYTVSTYLLDRLSELGIEHIFGVPGDYNLAFLDDVIAHENVEWIGNCNELNAAYAADGYARIKGIAALITTFGVGELSAINGIAGSYAENVPVIKITGTPPTTVMENGALVHHTLGDGKFDHFSNMYRELTVAQSKLTPEHAAEEIDRVLRACWSAKRPVHIQLPIDVYNKPINKPTEPILHKPVVSNKDALDKMLLHATSKINSAKKPVILADFEVERFHAKEYLYQFVEKTGFPIATLSMGKGIFPEKHPQFIGIYTGDVSSPYLRKRIDESDCIISIGVKLTDTITGGFTQGFMKEQVIEIHPYTVKITDKKYGPVVMKDVLQHLSDLIEHRNGETLDIKPFISESLSITEKFNPKPQMVTQKRFCQQIYHFLQEKDVLLAEQGTPFFGSATIPLPNDTTYVAQPLWGSIGYTLPALLGTQLANLSRRNILIIGDGSFQLTVQELSTILRQNLNPIIFLINNNGYTVERAIHGQNEPYNDIQMWDYTKLANVFGTEEKSLTCKVENEIELQEVLTKISNDKDQLTFVEVVMSQGDQPELLAKLGKRFGQQNS

SEQ ID NO: 84 - protein, 558 aa, Bacillus cereus
MKTQYTVSTYLLDRLSELGIEHIFGVPGDYNLAFLDDVIAHENVEWIGNCNELNAAYAADGYARIKGIAALITTFGVGELSAINGIAGSYAENVPVIKITGTPPTTVMENGALVHHTLGDGKFDHFSNMYREITVAQSKLTPEHAAEEIDRVLRACWSAKRPVHIQLPIDVYNKPINKPTEPILHKPVVSNKDALDKMLLHATSKINSAKKPVILADFEVERFHAKEYLYQFVEKTGFPIATLSMGKGIFPEKHPQFIGIYTGDVSSPYLRKRIDESDCIISIGVKLTDTITGGFTQGFMKEQVIEIHPYTVKITDKKYGPVVMKDVLQHLSDLIEHRNGETLDIKPFISESLSITEKFNPKPQMVTQKRFCQQIYHFLQEKDVLLAEQGTPFFGSATIPLPNDTTYVAQPLWGSIGYTLPALLGTQLANLSRRNILIIGDGSFQLTVQELSTILRQNLNPIIFLINNNGYTVERAIHGQNEPYNDIQMWDYTKLANVFGTEEKSLTCKVENEIELQEVLTKISNDKDQLTFVEVVMSQGDQPELLAKLGKRFGQQNS

SEQ ID NO: 85 - protein, 561 aa, Bacillus cereus
MIHLKTQYTVSTYLLDRLSELGIEHIFGVPGDYNLAFLDDVIAHENVEWIGNCNELNAAYAADGYARIKGIAALITTFGVGELSAINGIAGSYAENVPVIKITGTPPTTVMENGALVHHTLGDGKFDHFSNMYREITVAQSKLTPEHAAEEIDRVLRACWSAKRPVHIQLPIDVYNKPINKPTEPILHKPVVSNKDALDKMLLHATSKINSAKKPVILADFEVDRFHAKEYLYQFVEKTGFPIATLSMGKGIFPEKHSQFIGIYTGDVSSPYLRKRIDESDCIISIGVKLTDTITGGFTQGFTKEQVIEIHPYTVKITDKKYGPVVMKDVLQQLSDLIEHRNKNDLEIKPFLSESSSFTEEFNPKAQMVTQKRFWQQIYHFLQENDVLLVEQGTPFFGSSDIPLPNNTTYVAQPLWGSIGYTLPALLGTQLANLSRRNILIIGDGSFQLTVQELSTILRQNLNPIIFLINNNGYTVERAIHGQNEPYNDTQMWEYTKLANVFGTEEKSQTFKVENETELQEVLTKISIDKDQLTFVEIVMSQGDQPELLAKLGKRFGQQNS

SEQ ID NO: 86 - protein, 561 aa, Bacillus cereus
MILLKTQYTVSTYLLDRLYELGIEHIFGVPGDYNLAFLDDVIAHKNLEWIGNCNELNAAYAADGYARIKGVAALITTFGVGELSAINGIAGSYAENVPVIKITGTPTTTVMENGELVHHTLGDGKFDHFSNMYREITIAQTTLIPEHAAEEIDRVLRACWNEKRPVHINLPIDVYNKPINKPTEPILNHPIVSNKDALDKMLLHAISKINSAKKPVILADFEVNRFYAEEDLHQLVEKTGFPIASLSMGKGIFPEKHPQFIGIYTGDVSPPYLRKRVDESDCIISIGVKLTDTITGGFTQGFTKEQVIEIHPYTVKIIDKKYGPVVMKDVLQYLSNSIKHRNEETFEIKPFISESSSITKEFNPKAQIVTQQRFWQQLYHFLQENDVLIAEQGTPYFGSAAIPLPNNASFVGQPLWGSIGYTLPALLGTQLANVTRRNILIIGDGSFQLTVQELSTMLRHNLKPIIFLINNNGYTVERAIHGRDQPYNDIQMWDYNKLPNVFGSEEKSLTFKVENEIELAEVLNKISFNMNRLIFIEVVMSQGDQPELLAKLRKRFGIQNS

SEQ ID NO: 87 - protein, 558 aa, Bacillus cereus
MKTHYTVSTYLLDRLSELGIEHIFGIPGDYNLAFLDDVIAHEKLEWIGNCNELNAAYAADGYARIKGIAALITTFGVGELSAINGIAGSYAENVPVIKITGTPTTTVMENGELVHHTLGDGKFNHFSNMYREITVAQTNLTPEHAVEEIDRVLRACWNEKRPVHINLPIDVYNKPINKPAGPILHKPILSNKETLDKMLLHAISKINSAKKPIILADFEVDRFHAKEYLYQFVEKTGFPIATLSMGKGIFPEKHPQFIGIYTGDVSSPYLRKRIDESDCIISIGVKLTDTITGGFTQGFTKEQVIEIHPYTVKITDKKYGPVVMKDVLQQLSDVIEHRNEETLDIKPFISESLSMTEEFNPKAQMVTQKRFWQQIYHFLQENDVLLAEQGTPFFGSAAIPLPNDTTYVAQPLWGSIGYTLPALLGTQLANLSRRNILIIGDGSFQLTVQELSTMLRQNLKPIIFLINNNGYTVERAIHGQIEPYNDIQMWEYTKLANVFGTEEKSQTFKVENETELQEVLTKISIDKDQLTFVEVVMSQGDQPELLAKLGKRFGQQNS

SEQ ID NO: 88 - protein, 558 aa, Bacillus thuringiensis
MKTQYTVSTYLLDRLSELGIEHIFGVPGDYNLAFLDDVIAHENVEWIGNCNELNAAYAADGYARIKGIGALITTFGVGELSAINGIAGSYAENVPVIKITGTPTTTVMENGELVHHTLGDGKFNHFSNMYREITVAQTNLTPEHAVEEIDRVLRACWNEKRPVHINLPIDVYNKPINKPAEPILHKPILSNKETLDKMLLHAISKINSAKKPIILADFEVDRFHAKEYLYQFVEKTGFPIATLSMGKGIFPEKHPQFIGVYTGDVSSPYLRKRIDESDCIISIGVKLTDTIAGGFTQGFTKEQVIEIHPYTVKITDKKYGPVVMKDVLQQLSDLIEHRNKNDLEIKPFLSESSSFTEEFNPKAQMVTQKRFWQQIYHFLQENDVLLAEQGTPFFGSAAIPLPNNTTYVVQPLWGSIGYTLPALLGTQLANLSRRNILIIGDGSFQLTVQELSTMLRQNLKPIIFLINNNGYTVERAIHGQNEPYNDIQMWEYTKLAKVFGTEEKSLTFKVENETELQEVLTKISIDKDQLTFVEVVMSQGDQPELLAKLGKRFGQQNS

SEQ ID NO: 89 - protein, 558 aa, Bacillus anthracis
MKTQYTVSTYLLDRLSELGIEHIFGIPGDYNLAFLDYVLAHKNLEWIGNCNELNAAYAADGYARIKGIAALITTFGVGELSAINGIAGSYAENVPVIKITGTPPTTVMENGELVHHTLGDGKFNHFSKMYREITIAQTNLTPEHAVEEIDRVLRACWNEKRPVHINLPIDVYNKPINRPAEPILHKPILSNKETLDKMLLHAISKINSAKKPIILADFEVDRFHAKEYLYQFVEKTGFPIATLSMGKGIFPEKHPQFIGVYVGDVSPPYLRKRIDESDCIISIGVKLTDTITGGFTQGFTKEQVIEIHPYTVKITDKKYGPVVMKDVLQQLSDVIEHRNEETLDIKPFISESLSMTEEFNPKAHMVTQKRFWQQIYHFLQENDVLLAEQGIPFFGSAAIPLPNNTTYVAQPLWGSIGYTLPALLGTQLANLSRRNILIIGDGSFQLIVQELSTILRQNLNPIIFLINNNGYTVERAIHGQNEPYNDIQMWEYTKLAKVFGTEEKSQTFKVQNETELQEVLTKISIDKNQLTFVEIVMSQGDQPELLAKLGKRFGQQNS

SEQ ID NO: 90 - protein, 558 aa, Bacillus thuringiensis
MKKQYTISAYLLDRLHELGIEHIFGVPGDYNLAFLDDVVAHENLKWIGNCNELNAAYAADGYARIKGIAALITTFGVGELSAINGIAGSYAENVPVIKITGTPPTKVMENGAIVHHTLGDGKFDHFSNMYREITVAQTNVTPEHAAEEIDRVLRACWNEKRPVHINLPIDVYNKPINKPTEPILYKPILSNKEALDKMLLHATSIINNAKKPVILADFEVDRFHAKENLHQFVEKTGFPIATLSMGKGIFPEKHPQFIGIYTGDVSSPYLRKRIDESDCIISIGVKLTDTITGGFTQGFKKEQVIEIHPYTVKIIDKKYGPVVMQDVLQHLSDSIEHRNKDTLDVKPFILESSPFTEEFIPKAQMVTQKRFWQQMYHFLQENDVLIVEQGTPFFGSAAIPLPNNTAYVGQPLWGSIGYTLPALLGTQLANLSRRNILIIGDGSFQVTAQELSTILRQNLKPIIFLINNNGYTVERAIHGQNQPYNDIQMWDYNKLSMVFGAEEKSLTFKVENESELAEVLTNITFNKNQLIFIEVIMSQSDQPELLAKLGKRFGQQNS

SEQ ID NO: 91 - protein, 548 aa, Helicobacter felis
MKTTIGQYLLDRLKDYGIKYIFGVPGDYNLGFLDLIEDDPYLEWVGNCNELNASYAADGYGRIKSMAALVTTFGVGELSAINGIAGAYAESVPVVKIVGMPSRNVSNNKCLVHHTLGDGEFMKFFNMYKEVTTAQTILNKQNAKNEIDRVLAECYLQKKPVYIGIPVDVPNIQIAMSSPLRYKPKSDKKILNTFIEALKQEVKQAQSVIVLADYEVNRHCLNQALHDFIEKTNLPIASLAMGKGVFPENHPNFLGVYNGILSDEKVTKAIKSSDYALLIGVKLTDSLTAGFNYICPEPTPTIEIHPFYSKIGDKIYSDILMQDVLKRISALKFNATLPPKQPHKPKPKLEGKLTQEVFFQAIEQHLRPEDVLIAEQGTSFFGAIDIKLPDGVRFIGQPLWGSIGYTFGALLGTCLADRKRKNILLVGDGSLQLSAQELSTMLKENIAPIIIVINNDGYTVERCIHGPNRKYNDINMWHYTKLLDVFDANLQRHALAFKVSNIEDFSQALKSAYQHADKLVLIEALMQREDAPTLLKKLGELFSAQNSY

SEQ ID NO: 92 - protein, 548 aa, Helicobacter mustelae
MKISIGQYLLNRLKDYGIEHIFGVPGDYNLGFLDLIEDDEDLEWIGNCNELNASYAADGYARIRPMGALVSTFGVGELSAINGIAGAYAENVPVVKIVGMPSRNISLNKRLVHHTLGDGEFLKFYRMYEEVTVAQTILNKQNAKEEIDRVLRECHLQKKPVYIGIPVDVPGLQIEASKSVDYHPQSDKKILDAFIAGVKKELLGSKAQIVLADYEVNRYGLNSALHEFIQKTNLPIASLSMGKGVFKESHPNFVGIYNGILSDEAVTSAIKQADCSILIGVKLTDSLTAGFNYISKDPPTIEIHPFHSRIGDKIYSDILMQDVLKKLSALKFHPHRSTHTSLPKQKPHPSDTLTQERFFGLIEKHLEPNDVLIAEQGTSFFGSVDVRLPEGVTFVCQPLWGSIGYTFGAVLGTCLANKDRRNILLIGDGSLQLTAQELSTMLRENINPIIIVINNDGYTVERCIHGPNRKYNDINMWHYTKLIDTFDVTLKREALIFRASCVKELEEAFESARVHAKQLALIEVVMDRDDAPALLKKLGGLFSAQNSY

SEQ ID NO: 93 - protein, 552 aa, Sarcina ventriculi
MKITIAEYLLKRLKEVNVEHMFGVPGDYNLGFLDYVEDSKDIEWVGSCNELNAGYAADGYARLRGFGVILTTYGVGSLSAINATTGSFAENVPVLHISGVPSALVQQNRKLVHHSTARGEFDTFERMFREITEFQSIISEYNAAEEIDRVIESIYKYQLPGYIELPVDIVSKEIEIDEMKPLNLTMRSNEKTLEKFVNDVKEMVASSKGQHILADYEVLRAKAEKELEGFINEAKIPVNTLSIGKTAVSESNPYFAGLFSGETSSDLVKELCKASDIVLLFGVKFIDTTTAGFRYINKDVKMIEIGLTDCRIGETIYTGLYIKDVIKALTDAKIKFHNDVKVEREAVEKFVPTDAKLTQDRYFKQMEAFLKPNDVLVGETGTSYSGACNMRFPEGSSFVGQGSWMSIGYATPAVLGTHLADKSRRNILLSGDGSFQLTVQEVSTMIRQKLNTVLFVVNNDGYTIERLIHGPEREYNHIQMWQYAELVKTLATERDIQPTCFKVTTEKELAAAMEEINKGTEGIAFVEVVMDKMDAPKSLRQEASLFSSQNNY

SEQ ID NO: 94 - protein, 558 aa, Nostoc punctiforme
MATFTVGDYLLLRLEQIGIKHIFGVAGDYNMEFLDYIVNHNGIELIPTCNELNASYAADGYGRLNGIAALITTFGVGELSAINGVAGAYAEHVPVVAITGAPATKIQALGSLVHHTLGTGDFSMFARMYEQVTVAQAYLTNENATTEIDGVLGICLLKKLPVYISIPMDVALTEVSAPSDSFIPPVFQSDGATLAEIVDVCVNILEKASQPVILADIGVARYHLHEQLRKLLTATGYPYATMNMGKGLLEETHPQFIGIYNGAASEESVRKRIEQADCVLTIGALMTDFNTGKFSAKLDPSQTIEVHGQYVKVKHALYNNVAMADVLSALSQRLQRRDPQTLNFKSATENLDAGFITPIEGGSSAPITQQYFWHRFAHFLQEDDIIVAETGTCLFGASIVPLPKGATFVGQVLWGAIGYSVASLLGCALAKPTAGIAASQRRSILLVGDGSFQMTAQELSTILRYNLKPIIFLINNDGYTIERDIHGERMPYNDIQPWNYHQLPKVFGGNGWGIKVSTESQLDKALQTAQQNHDQLAFIEVVMDKMDSPEVLLKMLQQ

SEQ ID NO: 95 - protein, 576 aa, Salinispora arenicola
MGGSGGSVTVGELLLGRLHDLGVRHVFGVPGDYAMDFIDQIMTFDGIDWIGSSSEFNAGCSADGYARVAGIGAIVTQFGVGELSTMNALAGAMAESVPIVSVVGGPMLEVMRQRTSIHHSLADGDSERWIRMAREVTVAQASLTPECALQEIDRVLAECWSQQRPVYIRIPGDVAIAPVSRPSRRFTRPNPVVLPAQLDAFAAAAQRLLAGAERPALLVGNLPIRLGLGAAVAALANERNWPIATQMLGRGLVDETDPHYIGIYNGAESSAPVREVVEGADVLVCLGTTFFDWNGLFTAELDPARIINLRRDGAVVGGTCFAPVSMAAALDRLHEMAASRSVGWPSAALLHDPPEIDRASTDPIRQERLWSAVQDVLRPGDILVSEVGTAFFGAATMRLPAGTTVLAAPIWSLAGYTTPAAFGAGIAAPDRRVVSITGDGGIQISPQEISRMFVFDQHPIIFVVNNGGYSSERALEKAVGEETQAYTQIPDWRYSEIPAVFAPEGTFVAHVARTEAELAGILAGVDGRTDRLTLIEVIVDPTDLPPGLPQWSQEASAFIYHAQFPAPASLPWGGLG

SEQ ID NO: 96 - protein, 550 aa, Leishmania mexicana
MPFNGYTVGCHLLDRLVEAGCDDLFGVPGDFNLRFLDDVMAHPRMRWVGMANELNAAYAADGYARQRGLGAVTTTYGVGELSALNGIAGSFSESVPVIHIAGATSTKSQGNRELVHHSLGDGDHMHFLRISAEVCCIAVMLTPENCLTEIDRVITEVLYQKKPGYIALPMNVAEMIVSPPMAKLMRRLPEVSLEAVSAFKHTVASRLHSARNPAVLTGHLIHRHQCGPQVNHFLENIHIPYAPAVLGKGAVNEHLENYVGTYIAGDDPCPAKSVIESADVCIAIGVQFVDTVTAVFRHKIDPLKLIDIQPFFAKVGDQVFYQVPMEMAVKAVEEAAMECHANWSTEYPEPEGLRYPESAETFDLCHVWQEINNGLRPNDVLLVDLGTSSFTSALLRLPQGCDMLCQQMWASIGYTLPAAIGAQIADESRNVVCILGDGAAQMTVQEIGSAARYKLKPKYILINNDGYTIERYIRGWDSSYNDISVWNWTGLACNFCKGVEPRTHVVNSVGGVEAALREKRDNMVFVEVLVGKYEGPLRSSVPLPGKPASK

SEQ ID NO: 97 - protein, 550 aa, Leishmania sp.
MPFNGYTVGCHLLDRLVEAGCEHLFGVPGDFNLRFLDDVMAHTRMKWVGTANELNAAYAADGYARQRGLGAVATTYGVGELSALNGIAGSFAESVPVIHIAGAASTKSQGNRELLHHSLGDGNHMHFLNISAEVCCIAVMLTPENCLTEIDRVITEVLYQKKPGYVALPTDVAEMIVPPPAAKLTRRLPEVSLESVSAFKHTIASRLHSARNPAVLTGHLIHRHQCGPQVNHFLENIRIPYAPAVLGKGAVNEHLENYVGTYIAGDEPCPSKSIIESADVCISIGVQFVDTVTSVFRHKIDPLKMIDIQPFFAKVGDQVFYQVPMEMAVKAVEEAAMEFHTNWSTEYPEPERLRYPESPDTFDLCHVWQEINNGLRPNDVLLVDLGTSSFTSALLRLPQGCDMLCQQMWASIGYTLPAAIGAQIADESRSVVCILGDGAAQMTVQELGTAARYKLKPKYILINNDGYTIERYIRGWDSSYNDISVWNWTGLARNLCKGAEPRTCVVNSVGGVEATLHEKQDNMVFVEVLVGKYEGPLRSPVLLPGKPASK

SEQ ID NO: 98 - protein, 550 aa, Leishmania braziliensis
MPFNGYTVSCYLLDRLVEAGCEHLFGVPGDFNLRFLDDVMTNPRMKWIGTANELNAAYAADGYARQRGLGAVATTCGVGELSALNGIGGSFAESVPVIHIAGAPSTKSQGNRELLHHTLGDGNHAHFLHISAEVCCIAVMLTPENCLMEIDRVITEVLYQKKPGYIALPTNLAEMIVPPPPTKLMRRLPEVSPDSVSAFKLTVASHLHSSCNPAVLTGHLIQRYQCGPFVNRFLENVRIPYAAAVLGKGAVNEHLENYVGTYIAGNAPCPAKSVIENADVCISIGVQFVDTVTAVFRHKIDPLKLIDIQPFFAKVGDQIFPQVPMEVAVKVVEETAMECHTNWSTEYPDPDSFRSPDSADTLDLCHVWREIQNGLRPNDVLLVELGTSSFTSALLRLPQGCDMLCQQMWASIGYTLPAAIGAQLADENRRVVCIIGDGAAQMTVQELGTAARYRLKPTYILVNNDGYTIERFIRGWDSSYNDVAVWNWTGLARNFCKGVEPRTCLVNSVGGVEAVLRESQDNMVFAEVLVGKFEGPLCTSVELPGKPTSK

SEQ ID NO: 99 - protein, 583 aa, Leishmania donovani
MPFNGYTVGCHLLDRLVEAGCDHLFGVPGDFNLRFLDDVMAHPRMKWVGTANELNAAYAADGYARQRGLGAVATTYGVGELSALNGIAGSFAESVPVIHIAGATSTKSQGNRELLHHSLGDGSHMHFLNISAEVCCIAVMLTPENCLTEIDRVITEVLYQKKPGYIALPMNVAEMIVPPPPAKLMRRLPEVSLESVSAFKHTVASRLHSACSPAVLTGHLIHRHQCGPQVNHFLENVHIPYAPAVLGKGAVNEHLENYVGTYIAGDEPCPAKSVIESADVCISIGVQFVDTVTSIFRHKIDPLKMIDIQPFFAKVGDQVFYQVPMEMAVKAVEEVAMECHANWSTEYPEPEGLRYPESPDTFDLSHVWQEISNGLQPNDVLLVDIGTSSFTSALLRLPQGCDMLCQQMWASIGYTLPAAIGAQIADESRSVVCILGDGAAQMTVQELGSAARYKLKPKYILINNDGYTIERYIRGWDSSYNDISVWNWTGLARNFCKGVEPRTCVVNSVGGVEAVLREKQDNMVFVEVLVGKYEGPLRSSVPLPRKPASKEREALDFQRRESKSEGSGVDAETMMMASKTLLT

SEQ ID NO: 100 - protein, 583 aa, Leishmania infantum
MPFNGYTVGCHLLDRLVEAGCDHLFGVPGDFNLRFLDDVMAHPRMKWVGTANELNAAYAADGYARQRGLGAVTTTYGVGELSALNGIAGSFAESVPVIHIAGATSTKSQGNRELLHHSLGDGSHMHFLNISAEVCCIAVMLTPENCLTEIDRVITEVLYQKKPGYIALPMNVAEMIVPPPPAKLMRRLPEVSLESVSAFKHTVASRLHSARSPAVLTGHLIHRHQCGPQVNHFLENVHIPYAPAVLGKGAVNEHLENYVGTYIAGDEPCPAKSVIESADVCISIGVQFVDTVTSIFRHKIDPLKMIDIQPFFAKVGDQVFYQVPMEMAVKAVEEVAMECHTNWSTEYPEPEGLRYPESPDTFDLSHVWQEISNGLQPNDVLLVDIGTSSFTSALLRLPQGCDMLCQQMWASIGYTLPAAIGAQIADESRSVVCVLGDGAAQMTVQELGSAARYKLKPKYILINNDGYTIERYIRGWDSSYNDISVWNWTGLARNFCKGVEPRTCVVNSVGGVEAVLREKQDNMVFVEVLVGKYEGPLRSSVPLPRKPASKEREALDFQRRESKSEGSGVDAETMMMASKTLLT

SEQ ID NO: 101 - protein, 557 aa, Enterobacteriaceae bacterium
MSKTLNRNIYSVSDYLLDRLSQAGIQHVFGVPGDYNLRFLDFVTAHPQLAWVGCANELNAAYAADGYARCAPAAALVTTFGVGELSAINGTAGSYAEYLPVIHIVGAPNRRSQQKGELLHHTLGDGDYGHFYRMAAEVTCSQAVLTPENAALEIDRVLSDVLYHRRPGYILLPSDVCDEPIRTELYPFAARQDEVTGLSEFIHAARDLLKPARKVALLADFLADRFGQKQRVQQLSDLQGVASATLLMGKGVLDESRPNFIGTYAGGASQPKVKAAIENADVLISIGVRLTDSVTAGFTHQIAADKTIDLQPFSASVAGQVFSQLPMGDALAALTELAKELSVEWQAPESLRDCLPESHGNKLDQPAFWQQMQRFLRPDDIVVAEQGTASFGSATLRLPKGVTFIVQPLWGSIGYTLPAILGAQLAQPHRRVVLIIGDGSAQLTIQELGTLLRHGLKPVIILLNNDGYTVERAIHGPEESYNDIAAWNWTKIPSALSVNGDFSTYKADSVPALEKVLSEVNVPKALTLIEVMLPKMDVPEYLAKLSKAIAERNAAHE

SEQ ID NO: 102 - protein, 555 aa, Cronobacter sakazakii
MPVHYCIADYLLDRLAGCGVKHLFGVPGDYNLLFLDNVIAHPRITWVGCANELNSAYAADGYARCNGIGALLTTYGVGELSALNAIAGSYAEAVPVLHIVGAPCQAAQRKGEVLHHTLGDGDFHHFMRIAREVTAAQGWLTPANACSEIDRVIAEMLRTRRPGYLVLPTDVASAPAVAPVNAITVPRPQGDDAQLAAFREAAQARFASAGRVALLADFLAQRFGVQNGLHQWLDDTPMPHSSLLMGKGVLDETKPGFTGTYSGAASDPAVCQAIEEADLVICVGVQFADTITAGFTQRLTRDQTIDIQPWATRVGDRWFSGIAMDQAVAILHDIARRHSARLPPPDVAPPVAKPTTAGALNQQNFWPLIETFLQPGDIIAVDQGTAAFGAAALRLPAGCDFLVQPLWGSIGYALPAAFGAQTACPNRRVVLITGDGAAQLSIQEMGSMLRDGQAPVVIVLNNDGYTVERAIHGATQRYNDIAPWQWTKLPHALHADSQAQSWRVSDAAQLKEVLERLSRPERLSLIEVMLPRDDVPPLLDAVSRALEARNGAQDE

SEQ ID NO: 103 - protein, 550 aa, Salmonella enterica
MQNPYTVADYLLDRLAGCGIGHLFGVPGDYNLQFLDHVIDHPTLRWVGCANELNAAYAADGYARMSGAGALLTTFGVGELSAINGIAGSYAEYVPVLHIVGAPCSAAQQRGELMHHTLGDGDFRHFYRMSQAISAASAILDEQNACFEIDRVLGEMLAARRPGYIMLPADVAKKTAIPPTQALALPVHEAQSGVETAFRYHARQCLMNSRRIALLADFLAGRFGLRPLLQRWMAETPIAHATLLMGKGLFDEQHPNFVGTYSAGASSKEVRQAIEDADRVICVGTRFVDTLTAGFTQQLPAERTLEIQPYASRIGETWFNLPMAQAVSTLRELCLECAFAPPPTRSAGQPVRIDKGELTQESFWQTLQQYLKPGDIILVDQGTAAFGAAALSLPDGAEVVVQPLWGSIGYSLPAAFGAQTACPDRRVILIIGDGAAQLTIQEMGSMLRDGQAPVILLLNNDGYTVERAIHGAAQRYNDIASWNWTQIPPALNAAQQAECWRVTQAIQLAEVLERLARPQRLSFIEVMLPKADLPELLRTVTRALEARNGG

SEQ ID NO: 104 - protein, 553 aa, Klebsiella pneumoniae
MQPTYTIGDYLLDRLVDCGIDRLFGVPGDYNLQFLDRVIAHSALGWVGCANELNAAYAADGYARIKGAGALLTTYGVGELSALNGIAGSYAEHIPVLHIVGAPSTGAQQRGELLHHTLGDGDFRHFARMSEQITCSQALLTAGNACHEIDRVLRDMLTHHRPGYLMLPADVARAAAIAPAQRLLVEPAPADENQLAGFCEHASRLLRGSRRISLLADFLAQRYGLQKTLREWVAKTPVAHATMLMGKGLFDEQQSGFVGTYSGIASAPQTREAIENADTIICIGTRFTDTITAGFTQHLAREKTIEIQPFAVRVGDHWFSGVPMDKALAALMTLSAPLAAEWATPQVVAPEAEEGAEGELTQKNFWATVQGALRPGDIILADQGTAAFGIAALKLPSEASLIVQPLWGSIGFTLPAAYGAQTAAAERRVVLIVGDGAAQLTIQEMGSMLRDKQKPLILLLNNEGYTVERAIHGPEQRYNDIALWDWQRLPEAFAPDVASRCRRVTQTSELREAMTESITSDTLTLVEVMLPKMDIPDFLRAVTQALEERNSRV

SEQ ID NO: 105 - protein, 550 aa, Salmonella enterica
MQNPYTVADYLLDRLAGCGIGHLFGVPGDYNLQFLDHVIDHPTLRWVGCANELNAAYAADGYARMSGAGALLTTFGVGELSAINGIAGSYAEYVPVLHIVGAPCSAAQQRGELMHHTLGDGDFRHFYRMSQAISAASAILDEQNACFEIDRVLGEMLAARRPGYIMLPADVAKKTAIPPTQALALPVHEAQSGVETAFRYHARQCLMNSRRIALLADFLAGRFGLRPLLQRWMAETPIAHATLLMGKGLFDEQHPNFVGTYSAGASSKEVRQAIEDADRVICVGTRFVDTLTARFTQQLPAERTLEIQPYASRIGETWFNLPMAQAVSTLRELCLECAFAPPPTRSAGQPVRIDKGELTQESFWQTLQQYLKPGDIILVDQGTAAFGAAALSLPDGAEVVLQPLWGSIGYSLPAAFGAQTACPDRRVILIIGDGAAQLTIQEMGSMLRDGQAPVILLLNNDGYTVERAIHGAAQRYNDIASWNWTQIPPALNAAQQAECWRVTQAIQLAEVLERLARPQRLSFIEVMLPKADLPELLRTVTRALEARNGG

SEQ ID NO: 106 - protein, 555 aa, Klebsiella pneumoniae
MDMQPTYTIGDYLLDRLVDCGIDRLFGVPGDYNLQFLDRVIAHSALGWVGCANELNAAYAADGYARIKGAGALLTTYGVGELSALNGIAGSYAEHIPVLHIVGAPSTGAQQRGELLHHTLGDGDFRHFARMSEQITCSQALLTAGNACHEIDRVLRDMLTHHRPGYLMLPADVARAAAIAPAQRLLVEPAPADENQLAGFCEHASRLLRSSRRISLLADFLAQRYGLQKTLREWVAKTPVAHATMLMGKGLFDEQQSGFVGTYSGIASAPQTREAIENADTIICIGTRFTDTITAGFTQHLAREKTIEIQPFAVRVGDHWFSGVPMDKALAALMTLSAPLAAEWATPQVVAPEAEEGAEGELTQKNFWATVQGALRPGDIILADQGTAAFGIAALKLPSEASLIVQPLWGSIGFTLPAAYGAQTAAAERRVVLIVGDGAAQLTIQEMGSMLRDKQKPLILLLNNEGYTVERAIHGPEQRYNDIALWDWQRLPEAFAPDVASRCRRVTQTSELREAMTESITSDTLTLVEVMLPKMDIPDFLRAVTQALEERNSRV

SEQ ID NO: 107 - protein, 553 aa, Klebsiella sp.
MQPTYTIGDYLLDRLVDSGIDRLFGVPGDYNLQFLDRVIAHSALGWVGCANELNAAYAADGYARIKGAGALLTTYGVGELSALNGIAGSYAEHIPVLHIVGAPSTGAQQRGELLHHTLGDGDFRHFARMSEQITCSQALLTAGNACHEIDRVLRDMLTHHRPGYLMLPADVARAAAIAPAQGLLVEPAPADENQLAGFREHASRLLRGSRRISLLADFLAQRYGLQNTLREWVAKTPIAHATMLMGKGLFDEQLSGFVGTYSGIASAPQTREAIENADTIICIGTRFTDTITAGFTQHLAREKTIEIQPFAVRVGDHWFSGVPMDQALAALMTLSAPLAAEWAAPQVMAPEVEEEGEGELTQKNFWSTVQDALRPGDIILADQGTAAFGIAALKLPSEASLIVQPLWGSIGFTLPAAYGAQTAAAERRVVLIVGDGAAQLTIQEMGSMLRDKQKPLILLLNNEGYTVERAIHGPEQRYNDIALWDWQRLPEAFAPDVVSRCWRVTHTAELREAMAESITSDTLTLVEVMLPKMDIPDFLRAVTQALEERNSRV

SEQ ID NO: 108 - protein, 550 aa, Salmonella enterica
MQNPYTVADYLLDRLAGCGIGHLFGVPGDYNLQFLDHVIDHPTLRWVGCANELNAAYAADGYARMSGAGALLTTFGVGELSAINGIAGSYAEYVPVLHIVGAPCSAAQQRGELMHHTLGDGDFRHFYRMSQAISVASAILDEQNACFEIDRVLGEMFAARRPGYIMLPADVAKKTAIPPTQALTLPVHEAQSGVETAFRYHARQCLMNSRRIALLADFLAGRFGLRPLLQRWMVETPIAHATLLMGKGLFDEQHPNFVGTYSAGASSKEVRQAIEDADRVICVGTRFVDTLTAGFTQQLPAERTLEIQPYASRIGETWFNLPMAQAVSTLRELCLECAFAPPPTRSAGQPVRIDKGELTQESFWQTLQQYLKPGDIVLVDQGTAAFGAAALSLPDGAEVVVQPLWGSIGYSLPAAFGAQTACPDRRVILIIGDGAAQLTIQEMGSMLRDGQAPVILLLNNDGYTVERAIHGAAQRYNDIASWNWTQIPPALNAAQQAECWRVTQAIQLAEVLERLVRPQRLSFIEVMLPKADLPELLRTVTRALEARNGG

SEQ ID NO: 109 - protein, 553 aa, Enterobacter aerogenes
MQPTYTIGDYLLDRLVDCGIDRLFGVPGDYNLQFLDHVIAHQDLGWVGCANELNAAYAADGYARIKGAGALLTTYGVGELSALNGVAGSYAEHIPVLHIVGAPSTGAQQRGELLHHTLGDGDFTHFSRMSEQITCTQATLTAGNACHEIDRVLSDMLTHHRPGYLMLPADVAKARAVPPARALVIKGPAADENQLAGFREHAAKLLRSSRRVSLLADFLAQRYGLQNTLQQWVKSAPITHATMLMGKGLFDEQGSGFAGTYSGIASAPQTREAMESADAIICVGTRFTDTITAGFTHHLPTEKTIEIQPFAARVGDHWFSRIPMDQALAALIDVSGKLSAEWSAPDIIAPDASGAPQGNLTQKSFWSTVEKQLRPGDIILADQGTSAFGIASLKLPSQATLLVQPLWGSIGFTLPAAYGAQTAAADRRVVLIIGDGAAQLTIQEMSSMLRDKQKLLILLLNNEGYTVERAIHGPEQRYNDIALWDWSRFPDAFAPDTPSRCWRVTQTGELAEAMADSINSDKLTMVEVMLPKMDIPDFLRAVTQALENRNNRG

SEQ ID NO: 110 - protein, 550 aa, Salmonella enterica
MQTPYTVADYLLDRLAGCGIGHLFGVPGDYNLQFLDHVIDHPTLRWVGCANELNAAYAADGYARMSGAGALLTTFGVGELSAINGIAGSYAEYVPVLHIVGAPCSAAQQRGELMHHTLGDGDFHHFYRMSQAISAGSAILNEQNACFEIDRVLGEMVAARRPGYIMLPADVAKKTAIPPIEALTLPAHETQNGVETAFRYRARQCLMNSRRIALLADFLARRFGLRPLLQRWMAETSIAHATLLMGKGLFDEQHPNFVGTYSAGASSKAVRQAIEDADMVICVGTRFVDTLTAGFTQQLPAERTLEIQPYASRIGETWFNLPMAQAVSTLRELCLECAFAPPPTRPVCQPVQIEKGELTQENFWQTLQQYLKPGDIILVDQGTAAFGAAALSLPDGAEVVVQPLWGSIGYSLPAAFGAQTACPDRRVILIIGDGAAQLTIQEMGSMLRDGQAPIILLLNNDGYTVERAIHGAAQRYNDIASWNWTQIPQALNAAQQAECWRVTQAIQLAEVLERLARPQRLSFIEVMLPKADLPELLRTVTRALEARNGG

SEQ ID NO: 111 - protein, 550 aa, Salmonella enterica
MQNPYTVADYLLDRLAGCGIGHLFGVPGDYNLQFLDHVIDHPTLRWVGCANELNAAYAADGYARMSGAGALLTTFGVGELSAINGIAGSYAEYVPVLHIVGAPCSAAQQRGELMHHTLGDGDFRHFYRMSQAISAASAILDEQNACFEIDRVLGEMLAARRPGYIMLPADVAKKTAIPPTQALALPVHEAQSGVETAFRYHARQCLMNSRRIALLADFLAGRFGLRPLLQRWMAETPIAHATLLMGKGLFDEQHPNFVGTYSAGASSKEVRQAIEDADRVICVGTRFVDTLTAGFTQQLPTERTLEIQPYASRIGETWFNLPMAQAVSTLRELCLECAFAPPPTRSAGQPVRIDKGELTQESFWQTLQQYLKPGDIILVDQGTAAFGAAALSLPDGAEVVVQPLWGSIGYSLPAAFGAQTACPDRRVILIIGDGAAQLTIQEMGSMLRDGQAPVILLLNNDGYTVERAIHGAAQRYNDIASWNWTQIPPALNAAQQAECWRVTQAIQLAEVLERLARPQRLSFIEVMLPKADLPELLRTVTRALEARNGG

SEQ ID NO: 112 - protein, 553 aa, Enterobacter cloacae
MQPTYTIADYLLDRLTNCGIKHLFGVPGDYNLQFLDHVIEHPTICWVGCANELNAAYAADGYARTQGAGALLTTYGVGELSALNGVAGSYAEFVPVLHIVGAPGTQSQQRGELVHHTLGDGDFSHFYLMSEQVTVARAKLTASNACQEIDRVLREMLLHRRPAYLLLPADVAKAPATAPVSALSLGEMAADDNAMAEFLQASRQMLIGCRRVSLLADFLAQRYGLQPMMREWVATQPLAHATMLMGKGLFDEQQPGFVGTYSGAASARQTREAIEGADVTLCVGTRFTDTITAGFTQQLPLEKTIELQPFSARVGVRWFSDLPIGQAARALKQLCAELSVGWARFAAYSQEADDGVDGALTQPRFWRTLQAFLQPGDILLADQGTAAFGAAALRLPSDAMLIVQPLWGSIGFTLPAAFGAQTAAPERRVVLIIGDGAAQLTIQELGSMLRDEQRPLILLLNNEGYTVERAIHGPEQRYNDIALWNWTQLPQALSLECQAQSWRVTETVQFRDVLALAAGRQRLTLVEVVLPKQEVPALLHAITQALEARNNVH

SEQ ID NO: 113 - protein, 550 aa, Salmonella enterica
MQNPYTVADYLLDRLAGCGIGHLFGVPGDYNLQFLDHVIDHPTLRWVGCANELNAAYAADGYARMSGAGALLTTFGVGELSAINGIAGSYAEYVPVLHIVGAPCSAAQQRGELMHHTLGDGDFRHFYRMSQAISAASAILDEQNACFEIDRVLGEMLAARRPGYIMLPADVAKKTAIPPTQALALPVHEAQSGVETAFRYHARQCLMNSRRIALLADFLAGRFGLRPLLQRWMAETPIAHATLLMGKGLFDEQHPNFVGTYSAGASSKEVRQAIEDADRVICVGTRFVDTLTAGFTQQLPAERTLEIQPYASRIGETWFNLPMAQAVSTLRELCLECAFAPPPTRSAGQPVRIDKGELTQESFWQTLQQYLKPGDIVLVDQGTAAFGAAALSLPDGAEVVVQPLWGSIGYSLPAAFGAQTACPDRRVILIIGDGAAQLTIQEMGSMLRDGQAPVILLLNNDGYTVERAIHGAAQRYNDIASWNWTQIPPALNAAQQAECWRVTQAIQLAEVLERLARPQRLSFIEVMLPKADLPELLRTVTRALEARNGG

SEQ ID NO: 114 - protein, 550 aa, Citrobacter sp.
MQTPYSVADYLLDRLAGCGVGHLFGVPGDYNLQFLDRVIEHPDVCWVGCANELNAAYAADGYARVSGVGALLTTFGVGELSAINGIAGSFAEYVPVLHIVGAPCRGAQRRGELMHHTLGDGDFQHFYRMQQAVTTASAILDEQNACYEIDRVLRMMLSERRPGYLMLPADVAKQPATPPNDIMIVPLSEPESSVIEAFRYHARERLLDSPRVALLADFLALRFGLQPVLQRWMAETPMAHATLLMGKGLFDERHPAFVGTYSAGASSDYVRQAIEDADTIMCVGTQFVDTLTAGFTQQLPLDRTIDVQPHASRIGSHWFNIPMEQAVTTLRELCLEMSFSLPPERPPIRRVQVEKGPLTQENFWHTVQQFLKPDDIILVDQGTAAFGAAALSLPCGAEVLVQPLWGSIGYALPAAFGAQTACPDRRVILIIGDGAAQLTIQELGSMLRDGQSPVILLLNNDGYTVERAIHGANQRYNDIAAWSWTSVPQAFSRECQAECWRVKQAVQLEEVLARLSHPQRLSLIEVVLPKADLPELLRTVTRALESRNGG

SEQ ID NO: 115 - protein, 558 aa, Klebsiella pneumoniae
MRIMDMQPTYTIGDYLLDRLVDCGIDRLFGVPGDYNLQFLDRVIAYSALGWVGCANELNAAYAADGYARIKGAGALLTTYGVGELSALNGIAGSYAEHIPVLHIVGAPSTGAQQRGELLHHTLGDGDFRHFARMSEQITCSQALLTAGNACHEIDRVLRDMLTHHRPGYLMLPADVARAAAIAPAQRLLVEPAPADENQLAGFCEHASRLLRGSRRISLLADFLAQRYGLQKTLREWVAKTPVAHATMLMGKGLFDEQQSGFVGTYSGIASAPQTREAIENADTIICIGTRFTDTITAGFTQHLAREKTIEIQPFAVRVGDHWFSGVPMDKALAALMTLSAPLAAEWATPQVVAPEAEEGAEGELTQKNFWATVQGALRPGDIILADQGTAAFGIAALKLPSEASLIVQPLWGSIGFTLPAAYGAQTAAAERRVVLIVGDGAAQLTIQEMGSMLRDKQKPLILLLNNEGYTVERAIHGPEQRYNDIALWDWQRLPEAFAPDVASRCRRVTQTSELREAMTESITSDTLTLVEVMLPKMDIPDFLRAVTQALEERNSRV

SEQ ID NO: 116 - protein, 551 aa, Citrobacter rodentium
MQTPYTVADYLLDRLAGCGIAHLFGVPGDYNLQFLDHVIDHPDVCWVGCANELNAAYAADGYARLAGAGALLTTFGVGELSALNGLAGSYAEYVPVLHIVGAPCSGAQRRGELMHHTLGDGDFSHFYRMSQAVCAASAVLDEQTACHEIDRVLHAMLTSRRPGYLLLPADVAKRPAVPPSEALVPLQPESQESVVTAFRYQARQMLMNSPRVALLADFLARRFDLQPVLQRWMAETPMAHATLLMGKGLFDEQQPGFVGTYSGGASGEFVREAIEGADTTICVGTRFVDTLTAGFTQQLAAERTIEVQPHGSRIGQTWYSGISMEQAVVTLREVCLELSFAPPPAKPAGEQTQVKQGALNQQNFWHTVQQALQPGDVILADQGTAAFGAASLTLPAGAELLVQPLWGSIGYALPAAFGAQTAAPGRRVILITGDGAAQLTIQEMGSMLRDGQSPVILLLNNDGYTVERAIHGETQRYNDIARWNWTQIPHALNLAGRAECWRVTQAVQLAEVLARLTRPERLSLIEVVLPQADLPVLLRAVTRALETRNSG

SEQ ID NO: 117 - protein, 552 aa, Enterobacter cloacae
MRTPYCVADYLLDRLTDCGADHLFGVPGDYNLQFLDHVIDSPDICWVGCANELNASYAADGYARCKGFAALLTTFGVGELSAMNGMAGSFAEHVPVLHIVGAPGTASQQKGELLHHTLGDGEFRHFYHMSEPITVAQAILTEQNACYEIDRVLTTMLRERRPGYLMLPADVAKKSATPPVNALTLKTAHADNACLKAFRDAAESRLKTSKRTALLADFLVLRHGMKHALQKWVKEVPIAHATMLMGKGIFDERQPGFYGTYSGSASVGAVKEAIEGADTVLCIGTRFTDTLTAGFTHQLTQAQTIEVQPHAARVGDVWFTGIPMSDAIETLVALCKQYVHDTLAPVSHSGIAFPQSEGSLTQENFWSTLQTFIRPGDIILADQGTSAFGAIDLRLPADVNFIVQPLWGSIGYTLAAAYGAQTACPDRRVIVLTGDGAAQLTIQELGSMLRDKQHPIILVLNNEGYTVERAIHGPEQRYNDIALWNWTQIPQALSLDPQAQCWRVSEAEQLAEVLEKVAHHERLTLIEVMLPKADIPPLLGAITKALEARNNA

SEQ ID NO: 118 - protein, 550 aa, Salmonella enterica
MQNPYTVADYLLDRLAGCGIGHLFGVPGDYNLQFLDHVIDHPTLRWVGCANELNAAYAADGYARMSGAGALLTTFGVGELSAINGIAGSYAEYVPVLHIVGAPCSAAQQRGELMHHTLGDGDFRHFYRMSQAISAASAILDEQNACFEIDRVLGEMLAARRPGYIMLPADVAKKTAIPPTQALALPVHEAQSGVETAFRYHARQCLMNSRRIALLADFLAGRFGLRPLLQRWMAETPIAHATLLMGKGLFDEQHPNFVGTYSAGASSKEVRQAIEDADRVICVGTRFVDTLTAGFTQQLPAERTLEIQPYASRIGETWFNLPMAQAVSTLRELCLECAFAPPPTRSAGQPVRIDKGELTQESFWQTLQQYLKPGDIILVDQGTAAFGAAALSLPDGAEVVLQPLWGSIGYSLPAAFGAQTACPDRRVILIIGDGAAQLTIQEMGSMLRDGQAPVILLLNNDGYTVERAIHGAAQRYNDIASWNWTQIPPALNAAQQAECWRVTQAIQLAEVLERLARPQRLSFIEVMLPKADLPELLRTVTRALEARNGG

SEQ ID NO: 119 - protein, 550 aa, Salmonella enterica
MQNPYTVADYLLDRLAGCGIGHLFGVPGDYNLQFLDHVIDHPTLRWVGCANELNAAYAADGYARMSGAGALLTTFGVGELSAINGIAGSYAEYVPVLHIVGAPCSAAQQRGELMHHTLGDGDFRHFYRMSQAISAASAILDEQNACFEIDRVLGEMLAARRPGYIMLPADVAKKTAIPPTQALALPVHEAQSGVETAFRYHARQCLMNSRRIALLADFLAGRFGLRPLLQRWMAETPIAHATLLMGKGLFDEQHPNFVGTYSAGASSKEVRQAIEDADRVICVGTRFVDTLTAGFTQQLPTERTLEIQPYASRIGETWFNLPMAQAVSTLRELCLECAFAPPPTRSAGQPVRIDKGELTQESFWQTLQQYLKPGDIILVDQGTAAFGAAALSLPDGAEVVVQPLWGSIGYSLPAAFGAQTACPDRRVILIIGDGAAQLTIQEMGSMLRDGQAPVILLLNNDGYTVERAIHGAARRYNDIASWNWTQIPPALNAAQQAECWRVTQAIQLAEVLERLARPQRLSFIEVMLPKADLPELLRTVTRALEARNGG

SEQ ID NO: 120 - protein, 552 aa, Enterobacter cloacae
MRTPYCVADYLLDRLTDCGADHLFGVPGDYNLQFLDHVIDSPDICWVGCANELNASYAADGYARCKGFAALLTTFGVGELSAMNGIAGSYAEHVPVLHIVGAPGTAAQQRGELLHHTLGDGEFRHFYHMSEPITVAQAVLTEQNACYEIDRVLTTMLRERRPGYLMLPADVAKKAATPPVNALTHKQAHADSACLKAFRDAAENKLAMSKRTALLADFLVLRHGLKHALQKWVKEVPMAHATMLMGKGIFDERQAGFYGTYSGSASTGAVKEAIEGADTVLCVGTRFTDTLTAGFTHQLTPAQTIEVQPHAARVGDVWFTGIPMNQAIETLVELCKQHVHAGLMSSSSGAIPFPQPDGSLTQENFWRTLQTFIRPGDIILADQGTSAFGAIDLRLPADVNFIVQPLWGSIGYTLAAAFGAQTACPNRRVIVLTGDGAAQLTIQELGSMLRDKQHPIILVLNNEGYTVERAIHGAEQRYNDIALWNWTHIPQALSLDPQSECWRVSEAEQLADVLEKVAHHERLSLIEVMLPKADIPPLLGALTKALEACNNA

SEQ ID NO: 121 - protein, 551 aa, Citrobacter koseri
MQTPYSVADYLLDRLAGCGIGHLFGVPGDYNLQFLDHVIAHRDVCWVGCANELNAAYAADGYARLAGAGALLTTFGVGELSALNGLAGSYAEYVPVLHIVGAPCSGAQRRGELMHHTLGDGDFQHFYRISQAVTAASAVLNEQNACYEIDRVLRGMLTMRRPGYLMLPADVAKRPAVPPVNVLTPDRAEGENDTVAAFRYRARQRLMNSPRVALLADFLALRFGLQPVLQRWMAETPIAHATLLMGKGLFDEQHPNFVGTYSAGASSESVRQAIEEADTVICVGTRFVDTLTAGFTQQLPQERTIEIQPHASRVGNSWFSGLSMEQAVTTLRELCLELSFSPPPTPAHAPGGHIEKGTLTQENFWHTVQAYLLPGDIILADQGTAAFGAADLSLPAGADVLVQPLWGSIGYALPAAFGAQTACPERRVILITGDGAAQLTIQELGSMMRDGQSPVILLLNNDGYTVERAIHGANQRYNDIAGWNWTQVPQALSANCQAECWRVTQAIQLEEVLARLKSPQRLSLIEVVLPKADLPELLRTVTRALESRNGE

SEQ ID NO: 122 - protein, 550 aa, Salmonella enterica
MQNPYTVADYLLDRLAGCGIGHLFGVPGDYNLQFLDHVIDHPTLRWVGCANELNAAYAADGYARMSGAGALLTTFGVGELSAINGIAGSYAEYVPVLHIVGAPCSAAQQRGELMHHTLGDGDFRHFYRMSQAISAASAILDEQNACFEIDRVLGEMLAARRPGYIMLPADVAKKTAIPPTQALALPVHEAQSGVETAFRYHARQCLMNSRRIALLADFLAGRFGLRPLLQRWMAETPIAHATLLMGKGLFDEQHPNFVGTYSAGASSKEVRQAIEDADRVICVGTRFVDTLTAGFTQQLPTERTLEIQPYASRIGETWFNLPMAQAVSTLRELCLECAFAPPPTRSAGQPVRIDKGELTQESFWQTLQQYLKPGDIILVDQGTAAFGAAALSLPDGAKVVVQPLWGSIGYSLPAAFGAQTACPDRRVILIIGDGAAQLTIQEMGSMLRDGQAPVILLLNNDGYTVERAIHGAAQRYNDIASWNWTQIPPALNAAQQAECWRVTQAIQLAEVLERLARPQRLSFIEVMLPKADLPELLRTVTRALEARNGG

SEQ ID NO: 123 - protein, 553 aa, Klebsiella pneumoniae
MQPTYTIGDYLLDRLVDCGIDRLFGVPGDYNLQFLDRVIAHSALGWVGCANELNAAYSADGYARIKGAGALLTTYGVGELSALNGIAGSYAEHIPVLHIVGAPSTGAQQRGELLHHTLGDGDFRHFARMSEQITCSQALLTAGNACHEIDRVLRDMLTHHRPGYLMLPADVARAAAIAPAQRLLVEPAPADENQLAGFREHASRLLRGSRRISLLADFLAQRYGLQNTLREWVAKTPIAHATMLMGKGLFDEQLNGFVGTYSGIASAPQTREAIENADTIICIGTRFTDTITAGFTQHLAREKTIEIQPFAVRVGDHWFSGVPMDQALAALMTLSAPLAAEWAAPQVVAPEVEEEGEGELTQKNFWSTVQDALRPGDIILADQGTAAFGIAALKLPSEASLIVQPLWGSIGFTLPAAYGAQTAAAERRVVLIVGDGAAQLTIQEMGSMLRDKQKPLILLLNNEGYTVERAIHGPEQRYNDIALWDWQRLPEAFAPDVVSRCWRVTHTAELREAMAESITSDTLTLVEVMLPKMDIPDFLRAVTQALEERNSRV

SEQ ID NO: 124 - protein, 550 aa, Salmonella enterica
MQNPYTVADYLLDRLAGCGIGHLFGVPGDYNLQFLDHVIDHPTLRWVGCANELNAAYAADGYARMSGAGALLTTFGVGELSAINGIAGSYAEYVPVLHIVGAPCSAAQQRGELMHHTLGDGDFRHFYRMSQAISAASAILDEQNACFEIDRVLGEMLAARRPGYIMLPADVAKKTAIPPTQALTLPVHEAQSGVETAFRYHARQCLMNSRRIALLADFLAGRFGLRPLLQRWMAETPIAHATLLMEKGLFDEQHPNFVGTYSAGASSKEVRQAIEDADRVICVGTRFVDTLTAGFTQQLPAERTLEIQPYASRIGETWFNLPMAQAVSTLRELCLECAFAPPPTRSAGQPVRIDKGELTQESFWQTLQQYLKPGDIVLVDQGTAAFGAAALSLPDGAEVVVQPLWGSIGYSLPAAFGAQTACPDRRVILIIGDGAAQLTIQEMGSMLRDGQAPVILLLNNGGYTVERAIHGAAQRYNDIASWNWTQIPPALNAAQQVECWRVAQAIQLAEVLERLARPQRLSFIEVMLPKADLPELLRTVTRALEARNGG

SEQ ID NO: 125 - protein, 558 aa, Cronobacter sakazakii
MAKMPAHYCIADYLLDRLAGCGVKHLFGVPGDYNLLFLDNVIAHPRITWVGCANELNGAYAADGYARCNGIGALLTTYGVGELSALNAIAGSYAEAVPVLHIVGAPCQSAQRKGEVLHHTLGDGDFHHFMRIAREVTAAQGWLTPANACSEIDRVIAEMLRTRRPGYLVLPTDVASAPAVAPVNAITVPRPQGDDAQLAAFREAAQARFASAGRVALLADFLAQRFGVQNALHQWLDDTPMPHSSLLMGKGVLDETKPGFTGTYSGAASDPAVCQAIEEADLVICVGVQFADTITAGFTQRLTRDQTIDIQPWATRVGDRWFSGIAMDQAVAILHDIARRHSARLPPPDVAPPVAKPTTAGALNQQNFWPLIETFLQPGDIIAVDQGTAAFGAAALRLPAGCDFLVQPLWGSIGYALPAAFGAQTACPNRRVVLITGDGAAQLSIQEMGSMLRDGQAPVVIVLNNDGYTVERAIHGATQRYNDIAPWQWTKLPHALHADSQAQSWRVSDAAQLKEVLERLSRPERLSLIEVMLPRDDVPPLLDAVSRALEARNGAQDE

SEQ ID NO: 126 - protein, 550 aa, Citrobacter youngae
MQTPYSVADYLLDRLADCGVDHLFGVPGDYNLQFLDHVIEHPSVRWVGCANELNAAYAADGYARVAGAGALLTTFGVGELSAINGIAGSYAEYVPVLHIVGAPCCGAQRRGELMHHTLGDGDFQHFYRMQQAVTTASAVLDEQNACYEIDRVLRAMLTERRPGYLMLPADVAKQPATPPNDPLIVSQSEPASSVAAAFRYHARERLLDSPRVALLADFLALRFGLQPVLQRWMAETPMAHATLLMGKGLFDERHPAFVGTYSAGASSDYVRQAIEEADTIMCVGTQFVDTLTAGFTQRLPPERTIEVQPHASRVGSQWFNVPMEQAVTTLRELCLEMSFSLPPERPPVERIQIEKGLLTQENFWHTVQHYLAPDDIILVDQGTAAFGAAALSLPSGAEVLVQPLWGSIGYTLPAAFGAQTACPDRRVILIIGDGAAQLTIQELGSMLRDGQSPVILLLNNDGYTVERAIHGANQRYNDIAGWNWTQVPQALSRECQAECWRVKQAVQLEEVLARLSHPQRLSLIEVVLPKADLPELLRTVTRALESRNGG

SEQ ID NO: 127 - protein, 550 aa, Salmonella enterica
MQNPYTVADYLLDRLAGCGIGHLFGVPGDYNLQFLDHVIDHPTLRWVGCANELNAAYTADGYARMSGAGALLTTFGVGELSAINGIAGSYAEYVPVLHIVGAPCSAAQQRGELMHHTLGDGDFRHFYRMSQAISVASAILDEQNACFEIDRVLGEMLAARRPGYIMLPADVAKKTAIPPTQALALPVHEAQSGVETAFRYHARQCLMNSRRIALLADFLAGRFGLRPLLQRWMAETPIAHATLLMGKGLFDEQHPNFVGTYSAGASSKEVRQAIEDADRVICVGTRFVDTLTAGFTQQLPAERTLEIQPYASRIGETWFNLPMAQAVSTLRELCLECAFAPPPTRSAGQPVRIDKGELTQESFWQTLQQYLKPGDIILVDQGTAAFGAAALSLPDGAEVVVQPLWGSIGYSLPAAFGAQTACPDRRVILIIGDGAAQLTIQEMGSMLRDGQAPVILLLNNDGYTVERAIHGAAQRYNDIASWNWTQIPPALNAAQQAECWRVTQGIQLAEVLERLARPQRLSFIEVMLPKADLPELLRTVTRALEARNGG

SEQ ID NO: 128 - protein, 552 aa, Enterobacter sp.
MRTPYCVADYLLDRLSQCGVEHLFGVPGDYNLQFLDHVIDSPEIRWVGCANELNASYAADGYARCQGFAALLTTFGVGELSAMNGIAGSFAEYVPVLHIVGAPCSAAQQKGELMHHTLGDGEFRHFFKMSESITAAQAILTEQNACYEIDRVLSVMRRERRPGYLMLPADVAKKPAIPPVSAFTNALFPFDNACLQAFREAAEARLATSHRTALLADFLVLRYGLKNPLQAWVKETPMAHATMLMGKGIFDERQAGFYGTYSGAASTDAVRDAIEGADTVICVGTRFTDTLTAGFTHKLTAAQTIEVQPHAARIGDRWFTGIPIARAVEILSELCRQHVTQHDLPIHKPALSQEYHQGKLTQDNFWHTLQTFIRPGDIILADQGTAAFGASALRLPSDVNFIVQPLWGSIGFTLAAAFGAQTACPDRRVIVLTGDGAAQLTIQEIGSMLRDDQRPVILVLNNEGYTVERAIHGAEQRYNDIALWNWTQIPQALSLNCQAQCWRVSETVQLAEVLEKVAHRERLSLIEVMLPKEDIPSLLSAITKALEARNSG

SEQ ID NO: 129 - protein, 550 aa, Salmonella enterica
MQNPYTVADYLLDRLAGCGIGHLFGVPGDYNLQFLDHVIDHPTLRWVGCANELNAAYAADGYARMSGTGALLTTFGVGELSAINGIAGSYAEYVPVLHIVGAPCSAAQQRGELMHHTLGDGDFRHFYRMSQAISVASSILDEQNACFEIDRVLGEMLAARRPGYIMLPADVAKKTAIPPTEALALPVHEAQSGVETAFRYHARQCLMNSRRIALLADFLAGRFGLRPLLQRWMAETPIAHATLLMGKGLFDEQHPNFVGTYSAGASSKEVRQAIEDADRVICVGTRFVDTLTAGFTQQLPAERTLEIQPYASRIGETWFNLPMAQAVSTLRELCLECAFAPPPTRSAGQPVRIDKGELTQESFWQTLQQYLKPGDIILVDQGTAAFGAAALSLPDGAEVVVQPLWGSIGYSLPAAFGAQTACPDRRVILVIGDGAAQLTIQEMGSMLRDGQAPVILLLNNDGYTVERAIHGAAQRYNDIASWNWTQIPPALNAAQQAECWRVTQAIQLAEVLERLARPQRLSFIEVMLPKADLPELLRTVTRALEARNGG

SEQ ID NO: 130 - protein, 553 aa, Klebsiella variicola
MQPTYTIGDYLLDRLVDCGIDRLFGVPGDYNLQFLDRVIAHSALGWVGCANELNAAYAADGYARIKGAGALLTTYGVGELSALNGIAGSYAEHIPVLHIVGAPSTGAQQRGELLHHTLGDGDFRHFARMSEQITCSQALLTAGNACHEIDRVLRDMLTHHRPGYLMLPADVARAAAIAPAQGLLVEPAPADENQLAGFREHASRLLRGSRRISLLADFLAQRYGLQNTLREWVAKTPIAHATMLMGKGLFDEQLSGFVGTYSGIASAPQTREAIENADTIICIGTRFTDTITAGFTQHLSREKTIEIQPFAVRVGDHWFSGVPMDQALAALMTLSAPLAAEWAAPQVMAPEVEEEGEGELTQKNFWSTVQDALRPGDIILADQGTAAFGIAALKLPSEASLIVQPLWGSIGFTLPAAYGAQTAAAERRVVLIVGDGAAQLTIQEMGSMLRDKQKPLILLLNNEGYTVERAIHGPEQRYNDIALWDWQRLPEAFAPDVVSRCWRVTHTAELREAMAESITSDTLTLVEVMLPKMDIPDFLRAVTQALEERNSRV

SEQ ID NO: 131 - protein, 552 aa, Enterobacter cloacae
MRTPYCVADYLLDRLTDCGADHLFGVPGDYNLQFLDHVIDSPDICWVGCANELNASYAADGYARCKGFAALLTTFGVGELSAMNGVAGSFAEHVPVLHIVGAPGMAAQQRGELLHHTLGDGEFRHFYHMSEPITVAQAVLTEQNACYEIDRVLTTMLRERRPGYLMLPADVAKKVATPPVSALTVNPPPADSACLQAFREAAEKRLSTSKRTALLADFLVLRHGLRTALQTWVKEVPMAHATMLMGKGIFDERQSGFYGTYSGSASAAPVKEAIEGADTVLCIGTRFTDTLTAGFTHQLTPDQTIEVQPHASRVGDVWFTGIPMREAIETLTALCKTYVRDTRASLDHSGFSFPTIEGALTQESFWRTLQTFIRPGDIILADQGTSAFGAIDLRLPADVNFIVQPLWGSIGYTLAAAFGAQTACPNRRVIVLTGDGAAQLTIQELGSMLRDKQRPIILVLNNEGYTVERAIHGPEQRYNDIALWNWTQIPQALSLAPQAECWRVSEAEALAEVLDKVAHHERLSLIEVMLPKADIPPLLSALTKALEARNNA

SEQ ID NO: 132 - protein, 552 aa, Enterobacter cancerogenus
MTTPYCVADYLLDRLTDCGADHLFGVPGDYNLQFLDHVIDSPDICWVGCANELNASYAADGYARCKGFAALLTTFGVGELSAMNGIAGSFAEYVPVLHIVGAPGMASQQRGELLHHTLGDGEFRHFYHMSEPITVAQAILTEQNACYEIDRVLTTMLRERRPGYLMLPADVAKKAATPPVNALTMRATEGDDACLQAFRDAAQQRLAATRRTALLADFLVLRHGLKQALQKWVNEVPMAHATMLMGKGIFDERQAGFYGTYSGSASAAAVKEAIEGADTVLCIGTRFTDTLTAGFTHQLTPAQTIEVQPHASRVGDVWYTGITMQQAIETLTQLCKQHVHHARISGDAHRDAHSVQTGSLTQENFWSTLQTFIRPGDIILADQGTSAFGAIDLRLPADVNFIVQPLWGSIGYTLAAAFGAQTACPNRRVIVLTGDGAAQLTIQELGSMLRDKQHPIVLVLNNEGYTVERAIHGPEQRYNDIALWNWTQIPQALSLDPQAECWRVSEAEQLAEVLDKVAHHERLALIEVMLPKADIPPLLAALTKALEARNSA

SEQ ID NO: 133 - protein, 550 aa, Salmonella enterica
MQNPYTVADYLLDRLAGCGIGHLFGVPGDYNLQFLDHVIDHPTLRWVGCANELNAAYTADGYARMSGAGALLTTFGVGELSAINGIAGSYAEYVPVLHIVGAPCSAAQQRGELMHHTLGDGDFRHFYRMSQAISAASAILDEQNACFEIDRVLGEMLAARRPGYIMLPADVAKKTAIPPTEALALPVHEAQSGVETAFRYHARQCLMNSRRIALLADFLAGRFGLRPLLQRWMAETPIAHATLLMGKGLFDEQHPNFVGTYSAGASSKEVRQAIEDADRVICVGTRFVDTLTAGFTQQLPAERTLEIQPYASRIGETWFNLPMAQAVSTLRELCLECAFAPPPTRSAGQPVRIDKGELTQESFWQTLQQCLKPGDIILVDQGTAAFGAAALSLPDGAEVVVQPLWGSIGYSLPAAFGAQTACPDRRVILIIGDGAAQLTIQEMGSMLRDGQAPVILLLNNDGYTVERAIHGAAQRYNDIASWNWTQIPPALNAAQQAECWRVTQAIQLAEVLERLARPQRLSFIEVMLPKADLPELLRTVTRALEARNGG

SEQ ID NO: 134 - protein, 550 aa, Enterobacter cloacae
MRTPYCVADYLLDRLTDCGADHLFGVPGDYNLQFLDHVIDSPDICWVGCANELNASYAADGYARCKGFAALLTTFGVGELSAMNGIAGSYAEHVPVLHIVGAPGTAAQQRGELLHHTLGDGEFRHFYHMSEPITVAQAVLTEQNACYEIDRVLTTMLRERRPGYLMLPADVAKKAATPPVNALTHKQANADSACLKAFRDAAENKLAMSKRTALLADFLVLRHGLKHALQKWVKEVPMAHATMLMGKGIFDERQAGFYGTYSGSASTGAVKEAIEGADTVLCVGTRFTDTLTAGFTHQLTPAQTIEVQPHAARVGDVWFTGIPMNQAIETLVELSKQHVHTGLMSSSSGAIPFPQPDGSLTQENFWRTLQTFIRPGDIILADQGTSAFGAIDLRLPADVNFIVQPLWGSIGYTLAAAFGAQTACPNRRVIVLTGDGAAQLTIQELGSMLRDKQHPIILVLNNEGYTVERAIHGAEQRYNDIALWNWTHIPQALSLDPQSECWRVSEAEQLADVLEKVAHHERLSLIEVMLPKADIPPLLGALTKALEARN

SEQ ID NO: 135 - protein, 550 aa, Salmonella enterica
MQNPYTVADYLLDRLAGCGIGHLFGVPGDYNLQFLDHVIDHPTLRWVGCANELNAAYAADGYARMSGAGALLTTFGVGELSAINGIAGSYAEYVPVLHIVGAPCSAAQQRGELMHHTLGDGDFRHFYRMSQAISAASAILDEQNACFEIDRVLGEMLAARRPGYIMLPADVAKKTAIPPTQALALPVHEAQSGVETAFRYHARQCLMNSRRIALLADFLAGRFGLRPLLQRWMAETPIAHATLLMGKGLFDEQHPNFVGTYSAGASSKEVRQAIEDADRVICVGTRFVDTLTAGFTQQLPTERTLEIQPYASRIGETWFNLPMAQAVSTLRELCLECAFAPPPTRSAGQPVRIDKGELTQESFWQTLQQYLKPGDIILVDQGTAAFGAAALSLPDGAEVVVQPLWGAIGYSLPAAFGAQTACPDRRVILIIGDGAAQLTIQEMGSMLRDGQAPVILLLNNDGYTVERAIHGAAQRYNDIASWNWTQIPPALNAAQQAECWRVTQAIQLAEVLERLARPQRLSFIEVMLPKADLPELLRTVTRALEARNGG

SEQ ID NO: 136 - protein, 550 aa, Salmonella enterica
MQNPYTVADYLLDRLAGCGIGHLFGVPGDYNLQFLDHVIDHPTLRWVGCANELNAAYAADGYARMSGTGALLTTFGVGELSAINGIAGSYAEYVPVLHIVGAPCSAAQQRGELMHHTLGDGDFRHFYRMSQAISVASSILDEQNACFEIDRVLGEMLAARRPGYIMLPADVAKKTAIPPTEALALPVHEAQSGVETAFRYHARQCLMNSRRIALLADFLAGRFGLRPLLQRWMAETPIAHATLLMGKGLFDEQHPNFVGTYSAGASSKEVRQAIEDADRVICVGTRFVDTLTAGFTQQLPAERTLEIQPYASRIGETWFNLPMAQAVSTLRELCLECAFAPPPTRSAGQPVRIDKGELTQESFWQTLQQYLKPGDIILVDQGTAAFGAAALSLPDGAEVVVQPLWGSIGYSLPAAFGAQTACPDRRVILIIGDGAAQLTIQEMGSMLRDGQAPVILLLNNDGYTVERAIHGAAQRYNDIASWNWTQIPPALNAAQQAECWRVTQAIQLAEVLERLARPQRLSFIEVMLPKADLPELLRTVTRALEARNGG

SEQ ID NO: 137 - protein, 550 aa, Salmonella enterica
MQNPYTVADYLLDRLAGCGIGHLFGVPGDYNLQFLDHVIDHPTLRWVGCANELNAAYAADGYARMSGAGALLTTFGVGELSAINGIAGSYAEYVPVLHIVGAPCSAAQQRGELMHHTLGDGDFRHFYRMSQAISVASAILDEQNACFEIDRVLGEMLVARRPGYIMLPADVAKKTAIPPTQALALPVHEAQSGVETAFRYHARQCLMNSRRIALLADFLAGRFGLRPLLQRWMAETPIAHATLLMGKGLFDEQHPNFVGTYSAGASSKEVRQAIEDADRVICVGTRFVDTLTVGFTQQLPTERTLEIQPYASRIGETWFNLPMAQAVSTLRELCLECAFAPPPTRSAGQPVRIDKGELTQESFWQTLQQYLKPGDIILVDQGTAAFGAAALSLPDGAKVVVQPLWGSIGYSLPAAFGAQTACPDRRVILIIGDGAAQLTIQEMGSMLRDGQAPVILLLNNDGYTVERAIHGAAQRYNDIASWNWTQIPPALNAAQQAECWRVTQAIQLAEVLERLARPQRLSFIEVMLPKADLPELLRTVTRALEARNGG

SEQ ID NO: 138 - protein, 550 aa, Salmonella enterica
MQNPYTVADYLLDRLAGCGIGHLFGVPGDYNLQFLDHVIDHPTLRWVGCANELNAAYAADGYARMSGAGALLTTFGVGELSAINGIAGSYAEYVPVLHIVGAPCSAAQQRGELMHHTLGDGDFRHFYRMSQAISAASAILDEQNACFEIDRVLGEMFAARRPGYIMLPADVAKKTAIPPTQALTLPVHEAQSGVETAFRYHARQCLMNSRRIALLADFLAGRFGLRPLLQRWMAETPIAHATLLMGKGLFDEQHPNFVGTYSAGASSKEVRQAIEDADRVICVGTRFVDTLTAGFTQQLPAERTLEIQPYASRIGETWFNLPMAQAVSTLRELCLECAFAPPPTRSAGQPVRIDKGELTQESFWQTLQQYLKPGDIVLVDQGTAAFGAAALSLPDGAEVVVQPLWGSIGYSLPAAFGAQTACPDRRVILIIGDGAAQLTIQEMGSMLRDGQAPVILLLNNDGYTVERAIHGAAQRYNDIASWNWTQIPPALNAAQQAECWRVTQAIQLAEVLERLARPQRLSFIEVMLPKADLPELLRTVTRALEARNGG

SEQ ID NO: 139 - protein, 550 aa, Salmonella enterica
MQNPYTVADYLLDRLAGCGIGHLFGVPGDYNLQFLDHVIDHPTLRWVGCANELNAAYAADGYARMSGAGALLTTFGVGELSAINGIAGSYAEYVPVLHIVGAPCSAAQQRGELMHHTLGDGDFRHFYRMSQAISVASAILYEQNACFEIDRVLGEMLAARRPGYIMLPADVAKKTAIPPTEALALPVHEAQSGVETAFRYHARQCLMNSRRIALLADFLAGRFGLRPLLQRWMAETPIAHATLLMGKGLFDEQHPNFVGTYSAGASSKEVRQAIEDADRVICVGTRFVDTLTAGFTQQLPAERTLEIQPYASRIGETWFNLPMAQAVSTLRELCLECAFAPPPTRSTGQPVRIDKGELTQESFWQTLQQYLKPGDIILVDQGTAAFGAAALSLPDGAEVVVQPLWGSIGYSLPAAFGAQTACPDRRVILIIGDGAAQLTIQEMGSMLRDGQAPVILLLNNDGYTVERAIHGAAQRYNDIASWNWTQIPPALNAAQQAECWRVTQAIQLAEVLERLARPQRLSFIEVMLPKADLPELLRTVTRALEARNGG

SEQ ID NO: 140 - protein, 558 aa, Klebsiella sp.
MRIMDMQPTYTIGDYLLDRLVDCGIDRLFGVPGDYNLQFLDRVIAHSALGWVGCANELNAAYAADGYARIKGAGALLTTYGVGELSALNGIAGSYAEHIPVLHIVGAPSTGAQQRGELLHHTLGDGDFRHFARMSEQITCSQALLTAGNACHEIDRVLRDMLTHHRPGYLMLPADVARAAAIAPAQRLLVEPAPADENQLAGFCEHASRLLRGSRRISLLADFLAQRYGLQKTLREWVAKTPVAHATMLMGKGLFDEQQSGFVGTYSGIASAPQTREAIENADTIICIGTRFTDTITAGFTQHLAREKTIEIQPFAVRVGDHWFSGVPMDKALAALMTLSAPLAAEWATPQVVAPEAEEGAEGELTQKNFWATVQGALRPGDIILADQGTAAFGIAALKLPSEASLIVQPLWGSIGFTLPAAYGAQTAAAERRVVLIVGDGAAQLTIQEMGSMLRDKQKPLILLLNNEGYTVERAIHGPEQRYNDIALWDWQRLPEAFAPDVASRCRRVTQTSELREAMTESITSDTLTLVEVMLPKMDIPDFLRAVTQALEERNSRV

SEQ ID NO: 141 - protein, 552 aa, Enterobacter hormaechei
MRTPYCVADYLLDRLTDCGADHLFGVPGDYNLQFLDHVIDSPDICWVGCANELNASYAADGYARCKGFAALLTTFGVGELSAMNGVAGSFAEHVPVLHIVGAPGMAAQQRGELLHHTLGDGEFRHFYHMSEPITVAQAVLTEQNACYEIDRVLTTMLRERRPGYLMLPADVAKKAATPPVSALTLHPAPADSACLQAFREAAEKRLSMSKRTALLADFLVLRHGLRAALQTWVKEVPMAHATMLMGKGIFDERQRGFYGTYSGSASAAPVKEAIEGADTVLCIGTRFTDTLTAGFTHQLTPAQTIEVQPHASRVGDVWFTGIPMREAIETLTALCKTHVRDTRAPSDHSGFAFPTIEGALTQESFWRTLQTFIRPGDIILADQGTSAFGAIDLRLPADVNFIVQPLWGSIGYTLAAAFGAQTACPNRRVIVLTGDGAAQLTIQELGSMLRDKQRPIILVLNNEGYTVERAIHGPEQRYNDIALWNWTQIPQALSLAPQAECWRVSEAEALAEVLDKVAHHERLSLIEVMLPKADIPPLLSALTKALEARNNA

SEQ ID NO: 142 - protein, 555 aa, Cronobacter turicensis
MPANYCIADYLLDRLAGCGVKHLFGVPGDYNLLFLDNVIAHPRITWVGCANELNGAYAADGYARCNGIGALLTTYGVGELSALNAVAGSYAEAVPVLHIVGAPCQSAQRKGEVLHHTLGDGDFHHFLRIAREVTAAQGWLTPANACSEIDRVIAEMLRTRRPGYLVLPTDVARAPATAPVNAITAPRPQGDDAQLAAFREAAQARFAKGGRVALLADFLAQRFGVQNALHQWMDDTPMPHSSLLMGKGVLDETKPGFTGTYSGAASDPAVCRAIEEAELVICVGVQFADTITAGFTQRLTRDQTIDVQPWATRVGDRWFSGIAMDQAVAILHDITKRHSARLAPPDATPPAIKSTAAGALNQQNFWPLIEAFLQPGDIIAVDQGTAAFGAAALRLPAGCDFLVQPLWGSIGYALPAAFGAQTACPNRRVVLITGDGAAQLSIQEMGSMLRDGQAPVVMVLNNDGYTVERAIHGATQRYNDIAPWQWTKLPHALHAASQAQSWRVSDAAQLKDVLERLSRPERLSLIEVMLPRDDVPPLLDAVSRALEARNGAQDE

SEQ ID NO: 143 - protein, 550 aa, Salmonella enterica
MQNPYTVADYLLDRLAGCGIGHLFGVPGDYNLQFLDHVIDHPTLRWVGCANELNAAYAADGYARMSGAGALLTTFGVGELSAINGIAGSYAEYVPVLHIVGAPCSAAQQRGELMHHTLGDGDFRHFYRMSQAISAASAILDEQNACFEIDRVLGEMLAARRPGYIMLPADVAKKTAIPPTQALALPVHEAQSGVETAFRYHARQCLMNSRRIALLADFLAGRFGLRPLLQRWMAETPIAHATLLMGKGLFDEQHPNFVGTYSAGASSKEVRQAIEDADRVICVGTRFVDTLTAGFTQQLPTERTLEIQPYALRIGETWFNLPMAQAVSTLRELCLECAFAPPPTRSAGQPVRIDKGELTQESFWQTLQQYLKPGDIILVDQGTAAFGAAALSLPDGAEVVVQPLWGSIGYSLPAAFGAQTACPDRRVILIIGDGAAQLTIQEMGSMLRDGQAPVILLLNNDGYTVERAIHGAAQRYNDIASWNWTQIPPALNAAQQAECWRVTQAIQLAEVLERLARPQRLSFIEVMLPKAELPELLRTVTRALEARNGG

SEQ ID NO: 144 - protein, 550 aa, Pantoea sp.
MSTFTVGDYLLTRLQEIGIKHLFGVPGDYNLQFLDRVIAHPEISWVGCANELNAAYAADGYARCNGAGALLTTFGVGELSAINGTAGSYAEYLPVIHIVGAPATQAQLQGDCVHHSLGDGDFQHFIRMAAEVSVATALLNADNATAEIDRVIISALQARRPGYLSLAVDVAAMSVQPPAQPLNTHQPASADARRAFRAAAERLLAPAQRVSLLADFLALRWQQQSALAALREQSAIPCASLLMGKGVLDEQQPGYVGTYAGAASAGQVCEQIEQVDAAICVGVRFTDTITAGFTQQFATERLIDLQPFSASVGNERFAPLSMADALSELQPLFAHYGQQWQPAAAIPAAQPAEPTAVISQHAFWQAMQGFLQPGDLILAEQGTAAFGAAALRLPSRAQLVVQPLWGSIGYTLPAAFGAQTANPDRRVILIIGDGSAQLTIQELSSMLRDGQRLIIFLLNNDGYTVERAIHGATQRYNDIAPWNWTALPHALSLQGQAQSWRISETVQLDEVMTRLAAPQWLSLVEVVMLKDDLPPLLRKVTACLNQRNGG

SEQ ID NO: 145 - protein, 574 aa, Pantoea ananatis
MLPFSPNFRHVRYLSEQSPSKEFAMSDFTVGDYLLARLQECGVRHLFGVPGDYNLQFLDRVIAHPDIGWVGCANELNAAYAADGYTRCTGAAALLTTFGVGELSAINGLAGSFAEYLPVIHIVGAPSSQAMQQGDCVHHTLGDGDFGHFIRMAKEVSAATAALTADNATAEIDRVILTALQQHRPGYLMLPVDVAQRQTSAPDQPLMPTTASSDEVRIAFQQAAERLLAPAKRVSLLADFLAQRWQQQPALAALRTGRAFPCATLLMGKGVLDEQQPGFVGTYAGEGSEGDVRQQIEEVDVTICAGVRFTDTITAGFTQQFSQARLIDIQPHSASVAGQTFAPLSMAEALQALLPVFERLGAGWQAACAPRAAEPVSDAALISQSAFWQAMQGFLQPGDIILADQGTAAFGAASLRLPVGAQLLVQPLWGSIGYTLPAAFGAQTARPGQRVILIIGDGSAQLTIQELGSMLRDQQHPLIFLLNNEGYTVERAIHGAAQRYNDIAQWNWTALPQAMSLECQAQSWRISETVQLQALMAQLTQQRRLSFIEVVMQKDDLPPLLRKVSACLSQRNGG

SEQ ID NO: 146 - protein, 549 aa, Pantoea sp.
MKTLKVGEYLLMRLQQAGVRHLFGVPGDYNLQFLDSVIAHPDITWVGCANELNAAYAADGYGRCNGAAALLTTFGVGELSAINGIAGSYAEYVPVIHIVGAPASEVQRQGDCVHHSLGDGDFRHFSRMAEEVSVASAVLTAANAAQEIDRVIGEALHQRRPGYLLLAVDVAQAEIALPLPAATTTTPPPSAVAAFALAAETLLASARQVALLADFLAARWQLQPQLAALRQLRSIPAATLLMGKGVLDEQQPGFVGTYAGEGSTPAVRAAIEDTDVTICVGVRFTDTVTAGFTQQLPAEKLIDLQPFHAVVAGATFAPLTMAEALEALLPLFRRYGEHWATANALEWQQTPDAKAFLSQHTFWQAMQHFLRPGDIILADQGTAAFGAAALRLPHDAQLLVQPLWGSIGYTLPAAFGAQTAQPDRRVILIIGDGSAQLTIQELGSMQRDGQQPIIFLLNNEGYTVERAIHGAHQRYNDIAQWNWTALPQALSLTGEAQSWRVSETQQLEAVMARLAQNQRLALVEVVLDKDDIPPLLRKVTASLHQRNGG

SEQ ID NO: 147 - protein, 550 aa, Pantoea agglomerans
MSTFTVGDYLLTRLQEIGIKHLFGVPGDYNLQFLDRVIAHPEISWVGCANELNAAYAADGYARCNGAGALLTTFGVGELSAINGTAGSYAEYLPVIHIVGAPATQAQLQGDCVHHSLGDGDFQHFIRMAAEVSVATALLTADNATAEIDRVIISALQARRPGYLSLAVDVAAMAVQPPAQPLNTHQPASADARRAFRAAAERLLAPAQRVSLLADFLALRWQQQSALAALREQSAIPCASLLMGKGVLDEQQPGYVGTYAGAASAGQVCEQIEQVDAAICVGVRFTDTITAGFTQQFATERLIDLQPFSASVGNERFAPLSMADALSELQPLFEHYGQQWQPAAAIPAAQPAEPTAVISQHAFWQAMQGFLQPGDLILAEQGTAAFGAAALRLPSRAQLVVQPLWGSIGYTLPAAFGAQTANPDRRVILIIGDGSAQLTIQELGSMLRDGQRLIIFLLNNDGYTVERAIHGATQRYNDIAPWNWTALPHALSLQGQAQSWRISETVQLDEVMTRLAAPQWLSLVEVVMLKDDLPPLLRKVTACLNQRNGG

SEQ ID NO: 148 - protein, 550 aa, Pantoea vagans
MSTFTVGDYLLTRLQEMGIKHLFGVPGDYNLQFLDCVIDHPEISWVGCANELNAAYAADGYARCNGAGALLTTFGVGELSAINGIAGSFAEYLPVIHIVGAPATSAQLQGDCVHHSLGDGDFRHFIRMAAEVSAATAQLTADNATAEIDRVIEHALQARRPGYLSLAVDVAAIEVQPPVQPLNRHQSSSPAARRAFRDAAEQLLAPAERVSLLADFLALRWQQQSALAALREKSAIPCASLLMGKGVLDEQQPGYVGTYAGEASASQVCGQIELVDVAICVGVRFTDTITAGFTQQFAPERLIDLQPFSASVGGEHFAPLSMADALSELQPLFEHYGQQWQPAIAPSAVQPAAPAAVISQQAFWQAMQAFLQPGDLILAEQGTAAFGAAALRLPSQAQLVVQPLWGSIGYTLPAAFGAQTADPDRRVILIIGDGSAQLTIQELGSMLRDEQRMIIFLLNNEGYTVERAIHGATQRYNDIAQWNWTALPHALSLQGQAQCWRISETVQLDEVMARLSAPQWLSLVEVVMQKEDLPPLLRKVTACLNQRNGG

SEQ ID NO: 149 - protein, 550 aa, Pantoea ananatis
MSDFTVGDYLLARLQECGVRHLFGVPGDYNLQFLDRVIAHPDIGWVGCANELNAAYAADGYARCTGAAALLTTFGVGELSAINGLAGSFAEYLPVIHIVGAPSSQAMQQGDCVHHTLGDGDFGHFIRMAKEVSAATAALTADNATAEIDRVILTALQQHRPGYLMLPVDVAQRQTSAPDQPLMPTTASSDEVRIAFQQAAERLLAPAKRVSLLADFLAQRWQQQPALAALRTGRAFPCATLLMGKGVLDEQQPGFVGTYAGEGSEGDVRQQIEEVDVTICAGVRFTDTITAGFTQQFSQARLIDIQPHSASVAGQTFAPLSMAEALQALLPVFERLGAGWQAACAPRAAEPVPDAALISQSAFWQAMQGFLQPGDIILADQGTAAFGAASLRLPVGAQLLVQPLWGSIGYTLPAAFGAQTARPGQRVILIIGDGSAQLTIQELGSMLRDQQHPLIFLLNNEGYTVERAIHGAAQRYNDIAQWNWTALPQAMSLECQAQSWRISETVQLQALMAQLTQQRRLSFIEVVMQKDDLPPLLRKVSACLSQRNGG

SEQ ID NO: 150 - protein, 550 aa, Erwinia amylovora
MSTYTVGDYLLTRLNEIGISHLFGVPGDYNLRFLDHVIDHPDVDWVGCANELNAAYAADGYARCRGAGALLTTFGVGELSAINGVAGSSAEYLPVIHIVGAPSQTSQNKGELLHHTLGDGDFGHFIRMQQEISVASSVLTTANAAAEIDRVLFEALTKRRPVYLLLATNVAESPLSPPSSPLELRLDCDKAQLAAFVDAAESLLAPASSVAMLADFLADRAQQQQRLQRWLEEIPMPFATLLMGKSVLPEMLTGFVGTYAGAASADSTRAVIENSDVLISVGVRYTDSITAGFTQQITCSKNIDVGLHSSSVAGQPFEPVPMAAALEALYQLARKYGQGWQRGIVAPPVSEEQSSDGLTQDTFWHALQDFLRPGDIVLADQGTAAFGAADLRLPQDVRLLVQPLWGSIGYTLPAAFGAQTALPQQRVVLIIGDGSAQLTVQELGSILRDGQKPVIFLLNNDGYTVERAIHGAQQRYNDIARWDWTRLPQTLGIDSLAQSWRVTQTVQLREVMKLLQEGGHLSLVEVVLPRLDVPPLLASVCHALNQRNNS

SEQ ID NO: 151 - protein, 551 aa, Erwinia tasmaniensis
MMNKYTVGDYLLTRLNEIGIGHLFGVPGDYNLQFLDHVIDNPDVVWVGCANELNAAYAADGYARCRGAAALLTTFGVGELSAINGVAGSYAEYLPVVHIVGAPSQTSQNNAELLHHTLGDGDFGHFIRMQQEISVASSVLTPTNAAAEIDRVLVEALTRRRPVYLLLATNVAESLLSPPSSPLPLRLHCDQEQLAAFVDAAQSLLASANSVALLADFLADRAAQRQRLQRWLTEVPMPFATLLMGKSVLPEMLYGFAGTYAGASSADSTRDVIESSDVLISVGVKYTDTITAGFTQRIARSQNIDVGLHASSVAGQNFEQIPMADALKALHQLAQQYGQGWQQGIVAPPVSVEQPSDALTQNTFWHAIQDFLRPGDIVLADQGTAAFGTAVLRLPQDVRLLIQPLWGSIGYTLPAAFGAQTARPQQRVVLIIGDGSAQLTVQELGSMLRDGQKPVIFLLNNDGYTVERAIHGAQQRYNDIAHWDWTRLPQTLDVGSDAQSWRVTHTAQLREIMQRLEHREQLSLVEVVLPRLDVPPLLASVSRALHQRNGS

SEQ ID NO: 152 - protein, 550 aa, Erwinia sp.
MTTYTVGDYLLTRLNQIGIGHLFGVPGDYNLRFLDHVIDHPDLVWVGCANELNAAYAADGYARCRGAGALLTTFGVGELSAINGVAGSSAEYLPVIHIVGAPSQTSQNKGELLHHTLGDGDFGHFFRMQQEISVASSVLTPGNAAAEIDRVLIEALTKRRPVYLLLATNVAESPLSPPSSPLQLRLDCDKAQLAAFVDAAESLLAAARSVAMLADFLADRAQQQQRLQRWLEEIPMPFATLLMGKSVLPEMLFGFAGTYAGASSADSTRAVIENSDVLISVGVKYTDSITAGFTQQITRSKNIDVGLHASSVAGRQFEPVPMAAALEALHQLALKYGQGWQHGIVAPPVSEQQPSDSLTQNTFWHALQDFLRPGDIVLADQGTAAFGAAALRLPQDVRLLVQPLWGSIGYTLPAAFGAQTALPQQRVVLIIGDGSAQLTVQELGSMLRDGQHPVVFLLNNDGYTVERAIHGAQQRYNDIARWDWTRLPQTLGVDSQPQSWRVTQTVQLREVMKLLEEARQLSLVEVVLPKLDVPPLLASVSRALNQRNNS

SEQ ID NO: 153 - protein, 550 aa, Erwinia billingiae
MQSLTVGEYLLSRLWEAGIGHLFGVPGDYNLQFLDDVITSSEIGWVGCANELNAAYAADGYARCHGAAALLTTFGVGELSALNGVAGSYAEYLPVIHIVGAPATAAAREGLLLHHTLGDGDYRHFMRMSQEVTVAQAILTPENAVEEIDRLLIAALHERRPVYLYLATDVAVAKIIPAATPLATERPCDAATVAAFADAADQLLAGAKNVAMLADFLADRAQQQGKLKQLLTDAPMPFATLLMGKGVLPEQHTGFAGTYAGAASAGHTQQIIEQADVLITVGVLYTDTITAGFTQNIDSAKTLAIGLSSSRIGDKTFTQLPMSAALTALHPLVKRYAAQWPEPEVSPPPLNDVPSDALTQDSFWQAIQHFLKPGDIVLADQGTSAFGAAALRLPEGVTFISQPLWGSIGYTLPAAYGAQVACPDRRVVLLSGDGSAQLTIQELGSMLRDGMKPVIFILNNAGYTVERAIHGEHQRYNDIAAWNWTQLPQALSLNCAAQSWRVEQTVQLVEVMKVIAQSDRLSLVEVVLPPLDVPPLLQAVCEALNKRNSA

SEQ ID NO: 154 - protein, 550 aa, Erwinia pyrifoliae
MTTYTVGDYLLTRLNQIGIGHLFGVPGDYNLRFLDHVIDHPDLVWVGCANELNAAYAADGYARCRGAGALLTTFGVGELSAINGVAGSSAEYLPVIHIVGAPSQTSQNKGELLHHTLGDGDFGHFFRMQQEISVASSVLTPGNAAAEIDRVLIEALTKRRPVYLLLATNVAESPLSPPSSPLQLRLDCDKAQLAAFVDAAESLLAAARSVAMLADFLADRAQQQHRLQRWLEEIPMPYATLLMGKSVLPEMLFGFAGTYAGASSADSTRAVIENSDVLISVGVKYTDSITAGFTQQITRSKNIDVGLHASSVAGRQFEPVPMAAALEALHQLALKYGQGWQHGIVAPPVSEQQPSDSLTQNTFWHALQDFLRPGDIVLADQGTAAFGAAALRLPQDVRLLVQPLWGSIGYTLPAAFGAQTALPQQRVVLIIGDGSAQLTVQELGSMLRDGQHPVVFLLNNDGYTVERAIHGAQQRYNDIARWDWTRLPQTLGVDSQPQSWRVTQTVQLREVMKLLEEARQLSLVEVVLPKLDVPPLLASVSRALNQRNNS

SEQ ID NO: 155 - protein, 550 aa, Erwinia amylovora
MSTYTVGDYLLTRLNEIGISHLFGVPGDYNLRFLDHVIDHPDVDWVGCANELNAAYAADGYARCRGAGALLTTFGVGELSAINGVAGSSAEYLPVIHIVGAPSQTSQNKGELLHHTLGDGDFGHFIRMQQEISVASSVLTTANAAAEIDRVLFEALTKRRPVYLLLATNVAESPLSPPSSPLELRLDCDKAQLAAFVDAAESLLAPASSVAMLADFLADRAQQQQRLQRWLEEIPMPFATLLMGKSVLPEMLTGFVGTYAGAASADSTRAVIENSDVLISVGVRYTDSITAGFTQQITCSKNIDVGLHSSSVAGQPFEPVPMAAALEALYQLARKYGQGWQRGIVAPPVSEEQSSDGLTQDTFWHALQDFLRPGDIVLADQGTAAFGAAALRLPQDVRLLVQPLWGSIGYTLPAAFGAQTARPQQRVVLIIGDGSAQLTVQELGSILRDGQKPVIFLLNNDGYTVERAIHGAQQRYNDIARWDWTRLPQTLGIDSLAQSWRVTQTVQLREVMKLLQEGGHLSLVEVVLPRLDVPPLLASVCHALNQRNNS

SEQ ID NO: 156 - protein, 555 aa, Pectobacterium carotovorum
MSENYTVGDYLLDRLTQIGIQHLFGVPGDYNLHFLDHVIRHPEIAWVGCANELNAAYAADGYARCRPAAALLTTFGVGELSAINGIAGSYAECLPVIHIAAAPSLASQHNGELLHHTLGDGDFSHFSRMAAEVTVAQASLTVENATTEIDRVIGEALAQHKPVYLFLPLDVAAAPAGTRPYSLVIPEPLRSDESLQAFVTAATEMLSEAKSVSLLADFLAQRVGVAEQIQRWLDKTPLPHATLLMGKGTLNEQHRSFTGTYAGGGSHETIRAHIEDADVIISIGVRYTDTITTGFSHQIPSEKNIDIQPTLARVGSQVFPAIPMSDAIAALEKITAILAPRWDHRTITPPALPPSEHTDTLNQRELWQQMQRFLRSGDILVTDQGTSCFGAAALRLPSHCHFIVQPLWGSIGYSLPAAFGAQIAEPERRVVLLIGDGSLQLTVQELGSIIRDRLNIVIVVLNNEGYTVERAIHGPEQRYNDIAAWNWTQLPAALGADENEILCEQVCSPVALAQVLEQVNATSRFSLIEVVLPRMDIPALLHTITQSLETRNTVQ

SEQ ID NO: 157 - protein, 555 aa, Pectobacterium carotovorum
MNENYTVGDYLLDRLAQIGIQHLFGVPGDYNLHFLDHVISHPEVTWVGCANELNAAYAADGYARCRPAAALLTTFGVGELSAINGIAGSYAEFLPVIHIAVAPSLASQRNGELLHHTLGDGDFSHFFHMAAEVTAAQASLTVENAATEIDRVIREALSQHKPVYLFLPLDVAAAPVGAQPHPLTLPEPLCSDDSLQAFITAATAMLSKANTVSLLADFLAQRMGVAEQLQHWIDNTPFPHATLLMGKGTLNEQHRNFTGTYSGGGSDEAIRAHIEDADVIISVGVRYTDTITTGFSHQIACEKNIDIQPTLARVGSQVFPSIPMSDAIAALENITATLASRWDHRTITAPALPQSEQKDTLNQCEFWQQIQHFLRPGDILVTDQGTSCFGAATLRLPKDCQFIVQSLWGSIGYSLPAAFGAQIAEPNRRVVLLIGDGSLQLTVQELGSIIRDRLNMVIVVMNNEGYTVERAIHGPEQRYNDIAAWNWTQLPAALGANENEILCEQVCSPTALAQTLKQVNAESRLSLIEVVLPKMDIPALLHTITQSLETRNTVQ

SEQ ID NO: 158 - protein, 555 aa, Pectobacterium atrosepticum
MSENYTVGDYLLDRLTQIGIQHLFGVPGDYNLHFLDHVIRNPDITWVGCANELNAAYAADGYARCRPAAALLTTFGVGELSAINGIAGSYAECLPVIHIAAAPCLASQRNGELLHHTLGDGDFSHFSRMAAEVTVAQASLTVENATAEIDRVIGEALAQHKPVYLFLPVDVAAAPVGARPYPLVIPEPLHSDDSLRAFTTAATDMLSKAKSVSLLADFLAQRFSLAGKIQRWLDKTPLPHATLLMGKGTLNEQHRSFTGTYSGSGSHESIRAHIEDADAIISIGVRYTDTITTGFSHQIPIEKNIDIQPTLARVGNQVFPSVPMSDAIAVLEKITEKFASRWDHCTITPPVLPQSEHRSALSQREFWQQIQRFLRPDDILVTDQGTSCFGAATLRLPAGCHFIVQPLWGSIGYSLPAAFGAQIAEPERRVVLLIGDGSLQLTVQELGSIIRDRLNMVIVVLNNEGYTVERAIHGSEQRYNDIAAWNWTQLPTALGANENEILCKQVRSPIALAQVLEQVNAESRLSLIEVVLPRMDIPALLHTITQSLETRNTVQ

SEQ ID NO: 159 - protein, 552 aa, Rahnella sp.
MVNEYTVGDYLLDRLSLSGISELFGVPGDYNLKFLDSVINHQQITWVGCTNELNAAYGADGYARTKGIAALLTTFGVGELSALNGIAGSYAEYVPVVHIVGAPALTSQRKGELLHHTLGDGEFCHFMRMSAPVSVAQASLTPENALAEIDRVIEEVMYSSRPGYLLLPSDVAALPVSTRAHALPARQPPFSASSLEAFTAAAETQLRGANRVSLLADFLADRFKVKKALEQWMEEVPLAHSTLLMGKGLFNEQQAHFAGTYSGAASAPSTKEAIEGADVVITVGVKFTDTITAGFTQQLPSGKCIDLQPFFARVGDKIFHQLPLEKTVSVMHRLTAELASGRTPYLVKHNALPLSHDNSLGQYAFWQQIQDFLQPGDVLVAEQGTACFGAAALNLPQDCQFVVQPLWGSIGFTLPAAFGVQIAVPDRRVVLLIGDGSAQLTLQGLGAAIRYGLPPIIFVINNDGYTVERAIHGETQRYNDIAQWNWTQFPAAFGGKEVFSARADSPQALKEAIAKATARRQMAWIEVILPKMDIPELLNSVTKSLAQRNSGQ

SEQ ID NO: 160 - protein, 553 aa, Yersinia aldovae
MSGSYKVADYLLDRLAQVGIRHLFGVPGDFNLQFLDSVISHPVIQWMGCANELNASYAADGYARVMPAAALLTTAGVGELSAINGIAGSFAEYLPVVHIIGTPALRSQKAGELLHHSLGDGDFSHFSRMAKEVTCAQTSLTADNAAAEIDRLLAAALSQRRPVYLQLPSDVAEAAVSAPSGVLALAQPMLSLTSLQAFIEAARVKLQSAHRVALLADFLASRFGAQQPLQLLLAEVDIPHSTLMMGKGLLDETHPMFIGTYAGAASDAFVKEYIEEADVLITVGVWFVDTITAGFSQNILRDKGIDIQPEQVRIGNTIFSQIPMAAAVSALHQLGKALQSEWQQPRVTRLLPVSLPDNPLNQHAFWYHIQHFLRAGDIVITDQGTSSFGAATLSLPADCIFISQSLWGSIGFSLPAAYGVQAALPERRVILIVGDGAAQLTIQELGSLLRDGLKPVIFLLNNQGYTVERAIHGPQQPYNDIAVWDWSQIPRVFGMRNAILTRSVTEVDQLQQVLEQLEECDQLAFIEVVLPPMDVPELLANVAKSIQARNAAI

SEQ ID NO: 161 - protein, 557 aa, Yersinia rohdei
MGMIMASGYKVADYLLDRLAQIGIRHLFGVPGDFNLYFLDHVISHPVIQWIGCANELNAAYAADGYARVMPASALLTTVGVGELSAINGVAGSYAEYLPVIHIVGTPALRSQQAGELLHHSLGDGDFGHFSRMAKEITCAQASLTPENAAAEIDRLLVAALYQRRPVYLQLPSDVSEAEIATHSGSLALCQPMLSPTSLQAFIDAAREKLQPARRVAVLADFLAERFGARESLNRWLAEVNLPHSTLLLGKGLLDEAHPMFIGTYSGAASDSQVKEYIEDADVLITVGVWFVDTITAGFSQHITQDNCIDIQPEQVRIGRKVFSQIPMVAAVQALHKLCKSLKNEWQPPVITYSPPKTPTYNLLDQNAFWYHIQHFLRPNDVVVTDQGTSCFGAATLKLPSGCIFIAQSLWGSIGFSLPAAYGAQLAQPQRRMILLVGDGAAQLTIQELGSMLRDGLNPIIFLLNNHGYTVERVIHGPQQRYNDIAAWNWPQLPSALGLEKPAFTCTVTQVEQLQQVLAQVENIAQLAFIEVVLPPMDTPELLKNVAKSLQIRNAAL

SEQ ID NO: 162 - protein, 553 aa, Yersinia enterocolitica
MASNYKVADYLLDRLAQVGIRHLFGVPGDFNLHFLDHVISHPVIQWMGCANELNAAYAADGYARVMPAAALLTTTGVGELSAINGIAGSFAEYLPIIHIVGTPALRSQKAGELLHHSFGDGDFNHFARMAKEVACAHTSLTAENAASEIDRLLVAALYQRRPVYLQLPSDVGEAELTSQSGVLALSQPMLSPTSLQAFIEAARQKLQSAHRVALLADFLADRFGARQALNHWLAEVNLPHSTLLMGKGLLDETHPMFIGTYAGAASDASVREYIEEADVLITVGVWFVDTITAGFSQHITQDNCIDVQPEQVRIGRQVFSQIPMLAAVNALHELCLSLQSEWQQPVIAHSMPALPCDNLLSQQALWYHIQHFLRPDDIVVTDQGTSSFGAATLRLPSGCTFVAQSLWGSIGFSLPAAYGAQLAQPQRRVILLVGDGAAQLTIQELGSMLRDGLTPIIFLLNNHGYTVERAIHGPQQPYNDIAEWDWTQLPQALSVDKASLTCRVTQADELQQVLIQIENCQQLAFIEVMLPPMDMPELMINVAKSIQARNAAV

SEQ ID NO: 163 - protein, 553 aa, Serratia symbiotica
MSKNYTVSNYLLDRLAHIGIRHFFGVPGDYNLQFLDHIIDHQHITWVGCTNELNAAYAADSYARCKPAAALLTTFGVGELSAVNGIAGSYAEYLPVIHVVGAPTLRAQQAGYLLHHSLGDGDFGHFARMAKEVTIAQTCLTPYNAEAEIDRLLTTALFERRPVYLVLPCDVADTPLVSRPAPMTLRQANLSEMSLQEFIVAAREKLQSACRVSVLADFLVVRFNADVVLDQWMNEVKMPHSTLLHGKSVVDETHASFTGTYLGAASVPQVKRWIEDADVVINVGVLFTDIITAVFSHHLPVEKCITIHPFEARVGQQVFSQIPMQEAVKALHQLSLSLAKQWRLPVISRPTLPNANGSRLNQRIFWRQIQDFLRPGDIVFADQGTACFGAATLTLPQGCKFIVQSLWASIGYTLAAAFGAQIAEPNRRVVLLIGDGAAQLTAQELGSMLRDGLKPVIFLLNNQGYTIERAIRGSEQRYNDIAQWNWTLLLQALANEHPVQTLQVTEPEQLQQALLEVADCRQLAFIEVVLPKMDIPELLSFISRAIQKSNTVL

SEQ ID NO: 164 - protein, 553 aa, Serratia sp.
MSKSYTVADYLLDRLAQIGIRHFFGVPGDYNLQFLDHVIAHPQITWVGCANELNAAYAADGYARCKPAAALLTTFGVGELSAVNGIAGSYAEYLPVIHVVGAPALRAQRAGDLLHHSLGDGDFGHFARMAKEVTVAQASLTAANAEAEIDRLLTTALFERRPVYLMLPSDVAEAPLASRPAPLMLRQAHLSQASLQAFIAAAREMLLPARRVSLLADFLAERFGAERVLEQWMNEVDMPHSTLLLGKSVLDETHACFTGTYAGAASDPQVKQLIENADAVITVGVRFTDTITAGFSHHLPAEKCIDIQPFEARVGQQVFSQIPMCDAVKALHQLTLSLAKQWQLPVIKRPALPEPNGSGLDQHGFWQQIQDFLRPDDIVIAEQGTACFGAAALSLPQGCRFIVQSLWGSIGYTLPAAFGAQTAEPARRVVLLIGDGSAQLTAQEIGSMLRDGLKPVIFLLNNEGYTVERAIHGPEQRYNDIAQWNWTQLPQALAGEHQVKTLRVTEPEQLRQALREVGDSQQLAFVEVVLPKMDIPELLDTVSRAIQSRNAAA

SEQ ID NO: 165 - protein, 554 aa, Yersinia enterocolitica
MMASNYKVADYLLDRLAQVGIRHLFGVPGDFNLHFLDHVISHPVIQWMGCANELNAAYAADGYARVMPAAALLTTAGVGELSAINGIAGSFAEYLPIIHIVGTPALRSQKAGELLHHSFGDGDFNHFARMAKEVACAHTSLTAENAASEIDRLLVAALYQRRPVYLQLPSDVGEAELTSQSGALALSQPMLSPTSLQAFIEAARQKLQSAHRVALLADFLADRFGARQALNHWLAEVNLPHSTLLMGKGLLDETHPMFIGTYAGAASDASVREYIEEADVLITVGVWFVDTITAGFSQHITQDNCIDVQPEQVRIGRQVFSQIPMLAAVNALHELCLSLQGEWQQPVIAHSMPALPSDNLLSQQAFWYHIQHFLRPDDIVVTDQGTSSFGAATLRLPSGCTFVAQSLWGSIGFSLPAAYGAQLAQPQRRVILLVGDGAAQLTIQELGSMLRDGLTPIIFLLNNHGYTVERAIHGPQQPYNDIAEWDWTQLPQALAVDKASLTCRVTQADELQQVLTQIENCQQLAFIEVMLPPMDMPELMVNVAKSIQARNAAV

SEQ ID NO: 166 - protein, 553 aa, Serratia odorifera
MSKNYTVANYLLDRLAQMGIRHLFGVPGDYNLQFLDHVIDHPQVTWVGCANELNAAYAADGYARCKPAAAMLTTFGVGELSAINGVAGSYAEYLPVIHIVGAPTLRCQRSGELLHHSLGDGDFGHFARMAKEVTIAQASLTAANAEAEIDRLLTTALFERRPVYLLLPSDVAQAPLASRPAPLMLRQPNLSAASLQAFVKAARVQLQAAQRVSLLADFLADRFGAQQALSQWMQEVSIPHATLLMGKSVLDETHAAFTGTYAGAASAPPVKQLIEGADAIISIGVRLTDTITAGFSHSLPADKCIDIQPFEARVGQQVFSQIPMRDAVIALHQLTLPLCRHWTLPVIARTPLPQSHGGGLDQHGFWQQVQDFLRPGDIVLAEQGTASFGAAALTLPQGCHFIVQPLWGSIGYTLPAAFGVQTAEPERRVILLIGDGSAQLTAQELGSMLRDGQKPIVFLLNNDGYTVERAIHGPEQRYNDIAAWNWTLLPQAMGDGQRVKTLRVSEPESLRAALSEVNDCDRLAFIEVILPKMDIPELLDSVSRAIQVRNAAA

SEQ ID NO: 167 - protein, 576 aa, Serratia odorifera
MLDIFITYLILKTNNCNLLQVMIMSKSYKVADYLLDRLAQIGIRHFFGVPGDYNLQFLDHVIDHPQITWVGCANELNAAYAADGYARCKPAAALLTTFGVGELSAVNGIAGSYAEYLPVIHVVGTPALRAQRAGDLLHHSLGDGDFGHFARMAKEVTVAQANLTAVNAEAEIDRLLTTALFERRPVYLMLPSDVAEAPLASRPAPLMLRQAHLSQASLQAFIAAAREMLLPARRVSLLADFLAERFGAERVLEQWMNEVDMPHSTLLLGKSVLDETHACFTGTYAGAASDPQVKQLIENADAVITVGVRFTDTITAGFSHHLPAEKCIDIQPFEARVGQQVFSQIPMRDAVKALHQLTLSQALQWQLPVIKRPALPEPNGSGLDQHGFWQQIQGFLRPGDIVIAEQGTACFGAAALSLPQGCRFIVQSLWGSIGYTLPAAFGAQTAEPARRVVLLIGDGSAQLTAQEIGSMLRDGLKPVIFLLNNEGYTVERAIHGPEQRYNDITQWNWTQLPQALAGEHQVKTLRVTEPEQLRQALREVGDSQQLAFVEVVLPKMDIPELLDTVSRAIQSRNAAA

SEQ ID NO: 168 - protein, 561 aa, Yersinia kristensenii
MIVMSSNYKVADYLLDRLAQVGIRHLFGVPGDFTLHFLDHVISHPGIEWMGCANELNAAYAADGYARVMPAAALLTTVGVGELSAINGIAGSYAEYLPVIHIVGTPALRAQKAGELLHHSFGDGDFSHFSRMAKEVSCAQTSLTAENAVTEIDRLLVAALYQRRPVYLQLPSDVAQTDVVTHPEALALSQPILSPSSLQAFIAAAREKLQSAHRVALLADFLADRFGARQSLNNWLAAVNLPHSTLLMGKGLLDETHPLFLGTYAGAVSDIKVKECIENADVLVMVGVWFVDTITAGFSQHIIQDNCIDIQPEQVCIGRKVFSQIPMVTAVEALHTLCQSLQNEWQQPVITHPSTTLPTSEIVPHGWLNQQAFWSHIQSFLRPGDIVVTDQGTSCFGAASLKLPSGCTFIAQSLWGSIGFSLPAAYGAQLAQPQRRVILLVGDGAAQLTIQELGSMLRDGLTPIIFLLNNQGYTVERAIHGPQQRYNDIAEWDWTQLPQALALNKPSFSRRVTQVDQLQQVLAELENCQQLAFIEVVLPQMDAPELLINIAKSLQTRNAAV

SEQ ID NO: 169 - protein, 553 aa, Yersinia enterocolitica
MASNYKVADYLLDRLAQVGIRHLFGVPGDFNLHFLDHVISHPVIQWMGCANELNAAYAADGYARVMPAAALLTTTGVGELSAINGIAGSFAEYLPIIHIVGTPALRSQKAGELLHHSFGDGDFNHFARMAKEVACAHTSLTAENAASEIDRLLVAALYQRRPVYLQLPSDVGEAELTSQSGVLALSQPMLSPTSLQAFIEAARQKLQSAHRVALLADFLADRFGARQALNHWLAEVNLPHSTLLMGKGLLDETHPMFIGTYAGAASDASVREYIEEADVLITVGVWFVDTITAGFSQHITQDNCIDVQPEQVRIGRQVFSQIPMLAAVNALHELCLSLQSEWQQPVIAHSMPALPCDNLLSQQAFWYHIQHFLRPDDIVVTDQGTSSFGAATLRLPSGCTFVAQSLWGSIGFSLPAAYGAQLAQPQRRVILLVGDGAAQLTIQELGSMLRDGLTPIIFLLNNHGYTVERAIHGPQQPYNDIAEWDWTQLPQALSVDKASLTCRVTQADELQQVLTQIENCQQLAFIEVMLPPMDMPELMINVAKSIQARNAAV

SEQ ID NO: 170 - protein, 553 aa, Yersinia mollaretii
MASSYKVADYLLDRLAQVGIRHLFGVPGDFNLHFLDHVISHPVIEWMGCANELNAAYAADGYARVMPAGALLTTVGVGELSAINGIAGSFAEYLPVIHIVGTPALRSQKAGELLHHSLGDGDFSHFSRMAKEVTCAQASLTAENAAAEIDRLLVAALNQRRPVYLQLPSDVAEADMATNSGTLALSPPLLSPTSLQAFIDAAREKLQSAHRVALLADFLADRFGARQSLNQWLAEVNLPHSTLLLGKGVLDETHPLFIGTYAGAASDASVKEVIENADVLITVGVWYVDTITAGFSQHITQDNCIDVQPEQVRIGSRVFSQIPMVAAVDALHQLCKSLQGEWPQPVITPPVRQASQHHLLSQQTFWYHIQHFLRPNDIVVTDQGTSSFGAATLNLPSGCTFIAQSLWGSIGFSLPAAYGAQLAQPQRRLILLVGDGAAQLTIQELGSMLRDGLNPTIFLLNNQGYTVERAIHGAQQRYNDIAPWNWTQLPQALTVGKQFMTRKIKETHQLQQVLAQIEGAQQLVFIEVVLPPMDMPDLLISVAKSIQARNSAT

SEQ ID NO: 171 - protein, 553 aa, Serratia proteamaculans
MNTTYRVADYLLDRLAQIGIRHFFGVPGDYNLQFLDHVISHPQITWVGCANELNAAYAADGYARCKPAAALLTTFGVGELSALNGIAGSYAEYLPVIHVVGAPTLRAQRAGDLLHHSLGDGDFGHFARMAKEVTVAQASLTPDNAEAEIDRLLTIALFEHRPVYIVLPSEVAEAPLASRPAPLVLRQAHLSQASLQAFIAAARQMLLPARRVSLLADFLAERFGAEKVLEQWMNEVEIPHSTMLLGKSVLDETHACFTGTYAGAASDPQVKQLIEGADVVINVGVRFTDTITAGFSHHLPAEKCIDLQPFEARVGQQVFSQIPLRDAVIALHQLTLSLAKQWPVPAIKRPTLPDPNGSGLDQHGFWQQIQDFLRPGDILIAEQGTACFGAAALGLPQGCRFIVQSLWGSIGYTLPAAFGAQTAEPDRRVVLLIGDGSAQLTAQELGSMLRDGQKPVIFLLNNEGYTVERAIHGPQQRYNDIAQWNWTQLPQALAGEHQVKTLRVADPQQLRQALKEVGDSPQLAFVEVMLPKMDIPELLDSVSRAIHSRNAAA

SEQ ID NO: 172 - protein, 504 aa, Nasonia vitripennis
MKKSYTVADYLLDRLAQIGIHHLFGVPGDYNLQFLDHVISHPQIDWIGCANELNASYAADGYARCKPASAMLTTFGVGELSAINGIAGAYAEYLPIIHIIGAPVLQFQRDGLLLHHSLGDGDFEHFSRMAKEVSVAQACLTPSNAESEIDRLITIALSEHRPVHLVIPCDVAILPLVSKPAPLVLPTSVLSNTSLKMFIESARKKLTGTKKVSVLAGCLAERLNVQPLLQQWMDEVALPHSALLFGKGVFNENHSNYAGTYIGAASEAEIKNLIENVDVTINIGVLFIDTATAGFSHKLPTENCISIHPNEARVGHQVFTQIPMEDAIKALHQLTLSLAQQWPLPIINPPSLSPPLSQTSKSKLDQRSFWREIQKFIRPNDILFTDQGTSCFGAAELILPENCKFVIQSLWASVGFSLAATFGAQLAEPNRRVILLIGDGAAQFTVQELGTMLRNGLKPIIFLMNNQGYTVERAIHGPEQVYNDITAWDWTLLFKAFANQYPAF

SEQ ID NO: 173 - protein, 561 aa, Kineococcus radiotolerans
MTPAPAPDTSTTTVGGYLGRRLEQLGVGHVFGLPGDFNLALLDEVLAATGLRWVGSSNELNAGYAADGYARLRRGPAAVVTTFGVGELSAVNALAGSYAEDVPVVHVVGLPPTTAMSRGALLHHSLADGDFGHFVRIAAEVTASAVVVRAQGATTAIDQALLTAVGTSKPVYLGVPADVAVHPVPAAPLSRPLRVLRSDAGAAEEFRTALAQFLGDAPEVTVLAGPRLHRRNLEDLVRAIAAQNGVRVATQSASKAMLDESHPANLGVYAGEFTRSARTRRAVDGARPLVLAGVLMSDFLTGSFSHAFDPEASVDLQLDHARIAGTAFYGLYLEESLRILEEVLDARSPRPGPLPRQEVPALAPHVPAEPDGPLTHADLWPLLQRWLNPGTLLVAEAGTSFYGALELTTPDGCDLLGQPVWSSIGYTLPATLGAMLARPGRETVLVIGDGSAQLTIQELGRILAEGLTPTILLVNNSGYTVERAIRSPEAVYQDVVAWDWTKLPAALGSPGTPTYRAATPADLVEVLGKVRADPDHAAFVELLLPRDDAPDSLVQLARSVR

SEQ ID NO: 174 - protein, 556 aa, Psychrobacter arcticus
MSQQYTIADYLFDRIAEAGASEVFGVPGDFNLTFLDNIIASDKLRWVGNTNELNAGYAADGYARERGFAAMVTTFGVGELSAINATAGSFAEYAPVLHIVGAPSTALQDSKRRIHHSLGDGVFNHFIKMVEPVTVARAQITPENAASEIDRVIRLILKKHRPGYLMLSPDVARQPIYPPTTKLVDSQEDITSQAALADFKQALIAFLPNKTTTLMADLMVHRLGLQNQLKALIADTDIPYTTLSWGKTLLDENSDRWAGTYAGVASRPVVKDAVENCECLIKIGVQYTDTTTAGFSQDIDENVVVDLHYERASIAGKNFAPIALKDALKTLHEVMTSDINIVPKQFYKEVKPHEQHGKDNEAIRQDDLWHIIADHLDHNNLVFAEQGTAYFGISDVRLPEGVTCYGQPMWGSIGYTLPASLGAAIASPSKRSVLLIGDGSALLTIQEIAVMIQERINPVIVLINNDGYTVERAIHGENQRYNDIPKCDWQAMPKAFGATEENSLMLKVATAGELKASLEKAAATTDKLVMLEVIAAKHDIPPLLADISAALKPKAD

SEQ ID NO: 175 - protein, 553 aa, Psychrobacter sp.
MSQPIYTIADYLFDRVAEAGATEIFGVPGDYNLAFLDNIIASNKLRWVGNTNELNAGYAADGYARERRFSAMVTTFGVGELSAINATAGSYAEYVPVLHIVGAPNTQLRDGKRRLHHSLGDGVFNHFIKMVEPVSVARSEITAENAASEIDRVIRMVLKKQRPGYLLLSPDVAKLPIYRPTTQLKDSEEDITSQEALADFKKELSCYIEGKATTLIADLMVHRLGLQSQLKALIADTQIPYATLSWGKTLLDEHSDRWAGVYVGEPSQPTVKDAIENAECLIKLGVNYTDTTTSGFTQKIDTSKVVDIHQERATVADKTFAPIAMKDALKALHEVLTSGIEVVAKPLIAPVDVHQQQGGDDEPLLQKDLWHIVADCLDGNNLVFAEQGTAYFGMSEVRLPEGVTFYGQPLWGSIGYTLPASLGAGIASPNKRSVLLIGDGSALLTIQDLAVMIREQLNPVILLINNAGYTVERAIHGEEELYNDIPVCDWQVMPQAFGANQHNCLTLKAATPAELKSALSQADKAKDKMVFIEVITGMMDIPPLLQDVAASLK

SEQ ID NO: 176 - protein, 556 aa, Psychrobacter cryohalolentis
MSQQYTIADYLFDRVAEAGASEVFGVPGDFNLTFLDNVLASDKLRWVGNTNELNAGYAADGYARERGFAAMVTTFGVGELSAINATAGSFAEYAPVLHIVGAPSTALQDSKRRIHHSLGDGVFNHFIKMVEPVTVARAQITPENAASEIDRVIRVILKKHRPGYLLLSPDVAKTPIYPPTTKLIDSEEDITSQAALADFKQALIEFLPNKTTTLMADLMVHRLGLQNQLKALIADTDIPYTTLSWGKTLLDENSERWAGTYAGVASRPVVKDMVENCECLIKIGVQYTDTTTAGFSQDIDENVVVDLHYERASIAGKNFAPIALKDALKTLHEVMTSDINIVPKQFCEEVKQHEQHGKDNEAIRQDDLWHIIADALDDKNLVFSEQGTAYFGISDVRLPEGVTSYGQPMWGSIGYTLPASLGGAIASPHKRSILLIGDGSALLTIQEIAVMIQERINPVIVLINNDGYTVERAIHGENQYYNDIPKCDWQLMPKAFGANANNSLLLKAETAGELKDALKQAAAAKDKLVMLEVIAGKHDIPPLLADISAALKPKND

SEQ ID NO: 177 - protein, 553 aa, Psychrobacter sp.
MSEHAYTIADYLFDRVAEAGATEVFGVPGDYNLSFLDNIIASDKLRWVGNTNELNAGYAADGYARERRFAAMVTTFGVGELSAINATAGSFAEYAPVLHIVGAPDTELRKGKRRLHHSLGDGEFNHFIKMAEPVSVARAEITAKNAASEIDRVIRMVLKKQRPGYLLLSPDIAKLPIYPPTTKLKDSEEDITSQMALADFKEELAAFIQGKATTLIADLMVHRLGLQSQLKALISDTKIPYATLSWGKSLIDENGERWAGVYVGEASQPVVKDAVENAECLIKLGVNYTDTTTAGFTQNIERSRVVDIHQERATVGDKFFAPIAMKDALQALHEVLTSGIEIKPKPLIDKVGKHQQQGGDDEPLLQKDLWHIIAGSLDDSNIVFADQGTSYFGMSEVRLPEGVTFYGQPLWGSIGYTLPASLGAGLASPNKRSVLLIGDGSALLTIQDLAVMLREKLNPVILLINNSGYTVERAIHGEKQPYNDIPMCDWQLMPKAFGANEGNCVTLKVNTPVELKSALEQAKNTPDKMVFIEVVTEVMDIPSLLKQVAAALQ

SEQ ID NO: 178 - protein, 549 aa, Corynebacterium striatum
MYTIGDYLLDRLAEVGITELFGVPGDFNLKFLDHVVAHEKIRWVGNSNELNAGYAADGYARLRGIGAFLTTFGVGELSAANAIAGSYAENVPVIHIVGSPRKELQASVAKIHHSMGDGDFARFFRVDRELTCVAEDLNAMTAQAQIDNLIVQVLFQRKPGALHLAADVASTPCTPPKAPLPLIEQFDSEAAAQEFERDLKGFLKGRTLAVLADVLVHRFGCQSTLQGYLDRSGVPVATLSWGKSLIDEETSNFAGIYSGAASHGDTRKTVEEATALVTVGVDFTDNITAGFSVAISQDNQVDIRRDTAYIQGNAYTPLSMGRAIEILDQVTAEVSPEFMPVGKTNPAEKVEITDEPLSQEQLWAVVSRALEPGNVVIAEQGTSFFGLSAHHFPTDTVFIGQPMWGSIGYTLPATLGAALAQPGRRPVLLIGDGSAQLTIQEIGQMVREKVPAAIFLVNNNGYTVERAINGEDEYYNDIPAWDWSKTLDFFGAGDFGLTLRATTGAELEEAVAVATANKDKLVFVEAVTPYNDYPEQLKRVAAALAPRKR

SEQ ID NO: 179 - protein, 551 aa, Corynebacterium kroppenstedtii
MYTVADYIADRLAELHIKDVFGVPGDFNLEFLDHITGHDALHWVGNANELNAGYAADGYARMNGIGAVVTTFGVGELSAINAIAGSFSENVPVVHIVGAPSKDAQASRRLLHHSLGDGDFSHFRRMASEVTCAVADLTPADAVDEVDRVLRAVQTHRRPGYIVVPTDVARVEVEPPSSPLGGARSYTSDRALAEFRAAASEFLEGRDVTVLADLLVHRMGATENLNRLLSGGIPHATLMWGKTLVNEEDPFFLGVYAGAASEPDVRKAVEGADRLVMAGVRFTDTTTASFSQKIDPARCVDIATNYAKVGDKTFAPLNIADALDALAELAPSFADRAPGAVPEPEPHHWVADADGPLVQDDVWPTLAGVLTEGNIVVADQGTSFFGLAKMRFPADTTFIGQPLWGSIGYTLPAAMGAGLACPGRRPVLVIGDGSAQLTVQELGTWMREGVNGVVIVVNNDGYAVERSIHGEDAEYNDITAWDWRVIPQALGGTDDKVVTLKATTRTELNDAFEKAQDNQDRLVLIEVCTAPKDYPKLLKKIGKAINDANSK

SEQ ID NO: 180 - protein, 554 aa, Microbacterium testaceum
MTTYTVADYLLDRLAEAGVRHFFGVPGDFTLAFLDHVERHPLIEWVGCANELGAGYAADGYARLHGLGALSTTFGVGELSAISAVAGSYAEHVPVLHVVGAPTTGVQAAGRASHHSLGDGDFGHFARMTAEVTAAQEILTATDATAQIDRLLTDVRHRRLPGYLLIPADVGEAPSSPPTQPLPSPDAVTDPAVLTRFRDAVAARLAVADSAAVLADILVARLDAENHLHRMLASGVPHASLLWGRRVVDESASGYLGPYLGAASAPAVRAGIEDADVLVMAGVQFTDLTSGFFSQHIDPARTIEIRGEHARIGDDDFRPLAMRDALDAVAEELEALPGRFAVASEAPVVMPRVPADPGAALSQEALWHAVAGFLRDGDTVLADQGTSFYGMAGERLPRGVVFGGQPLWAAIGFTLPAILGAALARPERRPVLLIGDGAAQLTSAELGTLVRHGIPAVIVVVDNAGYTVERVIHGLHEEYNDIAAWDWTALLASMDPTESSVGVRVDSVGELTAALSDARAADGLTLIQAVVPQDDVPPVLADLAAAAAAANRRS

SEQ ID NO: 181 - protein, 554 aa, Nakamurella multipartita
MQTYTVADHLVDRLAELGIDRVFGVPGDYSLALLDHIVHHPSVAWTGTTNELNAGYAADGYARLRGMAALCTTFGVGELSAINAMAGSYAEHVPVVHVVGAPALVKQAQHRPVHHTLGDGEFGHFTAMHADITCARASLTEVNAVAEIDRVLTAVREQRLPGYLVVPADVAEAPVPRATAPLAPSADGTDPEALAAFTDAARALLDRAATRAEIGVLAGLLVHRFGAAGPLTDVLAAGVPHAVTPWAKSLVDESAPGFAGTYSGAAGSTETTRRAVEDAAALILAGVQFTDLNSGLFTQRITRSRTIDLGPRVACVGAATFAPIELADALAALAPLVADRPAADLAAAPPLDPEPPAPDGDPLTQATLWQEVADHLRAGDIVLADQGTSFYGMAPHPIPSGVTFVGQPLWASIGYTLPALVGACTAAPGRRGVLLVGDGAAQMTVTELSTVPRLGLRAVVLVVDNDGYTVERAIHGPDEPYNDIARWDWTALPAAFGAAGATAVRVETVGALRAALAAVPTRAAGLTLIQAVVPRDDVPDLLATLTRVLGGKTR

SEQ ID NO: 182 - protein, 554 aa, Segniliparus rotundus
MPQPYTIGHYLADRLAELGVRHVFGVPGDFNLMFLDRIVEHPGLAWVGNVNELNAGYAADGYARMNGIAALVTTFGVGELSAVNATAGSYAEHVPVVHICGGPTVDAQRARRSLHHSLGDGDFEHFLRIQREITCAQASLTPANATREIDRVLREVREQRRPGYLLLPSDVAQVPSYPPAAPIPGPQDASSPGALAAFQEAAAKLLADKRPAVLADLLVHRFGAVGELARLLDAGALPHATLLWGKSIVDELDPNFLGIYIGANSEPHVRAGVEEAEALILAGVQFTDFISGFFTQHLDVAKTVDIGPHESTVAGELFAPLEMRDALGALTELLSGRPRPPEPAAPAPPAASAASPGEALTQASMWDLLAGAVTPGNIVIAEAGTSFFGLATHPLPAGVTFIGQPLWASIGYTLPAALGAGLACPDRRVVLLIGDGSAQLTAQELSVIARYGLNAVIVVVDNDGYTVERAIHGAQQPYNDIDHWDYAKLLSAFEPETEPLCLRVGTVGGLRAAIEETEAAKDRLVLIEAVVAKMDMPPLLQKLGETMSEANTRA

SEQ ID NO: 183 - protein, 554 aa, Segniliparus rugosus
MTQPYTIGHYLVDRLAELGVRHVFGVPGDFNLMFLDRIVEHPGLAWVGNVNELNAGYAADGYARLNGIAALVTTFGVGELSAVNATAGSYAEHVPVVHICGAPTVDAQRARRSLHHSLGDGDFEHFLRIQREITCAQASLTPANATREIDRVLREVLEQRRPGYLLLPSDVAQVPSYPPAAPIPSPHDASSPGALAAFREAAAELLDGKRPTVLADLLVHRFRAVDALAKLLDAGELPHATLLWGKSLVNELDPNFLGIYIGANSEPHVRQSVEEAEALILAGVQFTDLISGFFTQRVEPAKTIDIAPHEATVAGELFAPLEMRDALDALTELISGRERPPVPQPEPAPAPAPPAAGDALTQASMWDLLADAVTPGNIVIAEAGTSFFGLATHPLPAGVTFIGQPLWASIGYTLPAALGAGLACPDRRVVLLIGDGSAQLTAQELSVIARHGLNPVIVVVDNDGYTVERAIHGADASYNDIDHWDYAKLLSAFEPAAEPLAFRVGTVGGLRAAIEEAGAAKDRLVLIEAEVAKMDMPPLLRKLGEHMSEANARK

SEQ ID NO: 184 - protein, 566 aa, Mycobacterium marinum
MTLLENDAATDPVYTVGDYLLDRLAELGVSEIFGVPGDYNLEFLDHIVAHPTIRWVGSANELNAGYAADGYGRLRGMSAVVTTFGVGELSATNAIAGSYAEHVPVVHIVGGPSKDAQGARRALHHSLGDGDFEHFFRISREITCAQANLMPATACREIDRVLCEVREQKRPGYLLLSTDVARFPTEPPGAPLPPLAGGTSPRALSLFTRAAADLIGDHQLTVLADLLVHRLQAVKELEAVLSADVVPHATLMWGKSLLDESSANFLGIYAGAASAEPVRTAIECAPVLVTAGVVFTDMVSGFFSQRIDPARTIDIGQYQSSVADQVFAPLEMGAALQAVATILTKRGINSPPVAVPPAEPGPPTPGRDEPLNQEMLWNRLCEALTPGNVVLADQGTSFYGMADHRLPQGVTFIGQPLWGSIGYTLPAALGAAVAHPDRRTVLLIGDGAAQLTVQELGIFSREGLSPVIVVVNNDGYTVERAIHGETATYNDIVSWRWTDVPGALGVTNHLAMRAENYGELDDALTAAAEQQDRMVVVEAVLPRLDVPPLLDELVGSLSPPECGGRS

SEQ ID NO: 185 - protein, 560 aa, Mycobacterium tuberculosis
MTPQKSDACSDPVYTVGDYLLDRLAELGVSEIFGVPGDYNLQFLDHIVAHPTIRWVGSANELNAGYAADGYGRLRGMSAVVTTFGVGELSVTNAIAGSYAEHVPVVHIVGGPTKDAQGTRRALHHSLGDGDFEHFLRISREITCAQANLMPATAGREIDRVLSEVREQKRPGYILLSSDVARFPTEPPAAPLPRYPGGTSPRALSLFTKAAIELIADHQLTVLADLLVHRLQAVKELEALLAADVVPHATLMWGKSLLDESSPNFLGIYAGAASAERVRAAIEGAPVLVTAGVVFTNMVSGFFSQRIDPARTIDIGQYQSSVADQVFAPLEMSAALQALATILTGRGISSPPVVPPPAEPPPAMPARDEPLTQQMVWDRVCSALTPGNVVLADQGTSFYGMADHRLPQGVTFIGQPLWGSIGYTLPAAVGAAVAHPDRRTVLLIGDGAAQLTVQELGTFSREGLSPVIVVVNNDGYTVERAIHGETAPYNDIVSWNWTELPSALGVTNHLAFRAQTYGQLDDALTVAAARRDRMVLVEVVLPRLEIPRLLGQLVGSMAPQ

SEQ ID NO: 186 - protein, 561 aa, Mycobacterium avium
MTDAATEPAYTVGDYLLDRLAELGVSEIFGVPGDYNLEFLDHIVAHPRLRWVGNANELNAGYAADGYGRLRGMSALVTTFGVGELSAANAVAGSYAEQVPVVHIVGGPSKDAQGTRRALHHSLGDGDFEHFFRVSREITCAQANLMPATARREIDRVLSEVREQKRPGYILLSTDVARFPTEPPEAALPRYTGGTSPRALAMFTDAAAALIGEHRITVLADLLVHRLQAIKELEALLAADVVPHATLMWGKSLLDESSPNFLGIYAGSASAPAVRTAIEEAPVLVTAGVVFTDMVSGFFSQRIDPARTIDVGQYQSSVAGEVFAPLEMGEALQALTAILTRRGVSSPPVASPPAEPLPPPPPREQPLTQKMVWDRVCTALTPGNVVLADQGTSFYGMADHRLPQGVTFIGQPLWGSIGYTLPAALGAAVAHPDRRTVLLIGDGAAQLTVQELGTFAREGLSPVIVVVNNDGYTVERAIHGETAPYNDIVGWKWTEVPNALGVTDHLAFRVQTYGELDDALTAAARHQDRMVLVEVVLPRLEIPRLLVELVRPTSPDGSPRR

SEQ ID NO: 187 - protein, 563 aa, Mycobacterium avium
MPVTDAATEPAYTVGDYLLDRLAELGVSEIFGVPGDYNLEFLDHIVAHPRLRWVGNANELNAGYAADGYGRLRGMSALVTTFGVGELSAANAVAGSYAEQVPVVHIVGGPSKDAQGTRRALHHSLGDGDFEHFFRVSREITCAQANLMPATARREIDRVLSEVREQKRPGYILLSTDVARFPTEPPEAALPRYTGGTSPRALAMFTEAAAALIGEHRITVLADLLVHRLQAIKELEALLAADVVPHATLMWGKSLLDESSPNFLGIYAGSASAPAVRTAIEEAPVLVTAGVVFTDMVSGFFSQRIDPARTIDVGQYQSSVAGEVFAPLEMGEALQALAAILTRRGVSSPPVASPPAEPLPPPPPREQPLTQKMVWDRVCTALTPGNVVLADQGTSFYGMADHRLPQGVTFIGQPLWGSIGYTLPAALGAAVAHPDRRTVLLIGDGAAQLTVQELGTFAREGLSPVIVVVNNDGYTVERAIHGETAPYNDIVGWKWTEVPNSLGVTDHLAFRVQTYGELDDALTAAARHQDRMVLVEVVLPRLEIPRLLVELVRPTSPDGSPRR

SEQ ID NO: 188 - protein, 566 aa, Mycobacterium ulcerans
MTLLENDAATDPVYTVGDYLLDRLAELGVSEIFGVPGDYNLEFLDHIVAHPIIRWVGSANELNAGYAADGYGRLRGMSAVVTTFGVGELSATNAIAGSYAEHVPVVHIVGGPSKDAQGARRALHHSLGDGDFEHFFRISREITCAQANLMPATACREIDRVICEVREQKRPGYLLLSTDVARFPTEPPGAPLPPLAGGTSPRALSLFTRAAADLIGDHQLTVLADLLVHRLQAIKELEALLSADVVPHATLMWGKSLLDESSANFLGIYAGAASAEPVRKAIEQAPVLVTAGVVFTDMVSGFFSQRIDPARTIDIGQYQSSVADQVFAPLEMGAALQAVATILTKRGISSPPVAVPPAEPGPPTPRRDEPLNQEMLWNRLCEALTPGNVVLADQGTSFYGMADHRLPQGVTFIGQPLWGSIGYTLPAALGAAVAHPDRRTVLLIGDGAAQLTVQELGIFSREGLSPVIVVVNNDGYTVERAIHGETATYNDIVSWRWTDVPGALGVTNHLAMRAENYGELDDALTAAAEQQDRMVVVEAVLPRLDVPPLLDELVGSLSPPECGGRS

SEQ ID NO: 189 - protein, 561 aa, Mycobacterium avium
MTDAATEPAYTVGDYLLDRLAELGVSEIFGVPGDYNLEFLDHIVAHPRLRWVGNANELNAGYAADGYGRLRGMSALVTTFGVGELSAANAVAGSYAEQVPVVHIVGGPSKDAQGTRRALHHSLGDGDFEHFFRVSREITCAQANLMPATARREIDRVLSEVREQKRPGYILLSTDVARFPTEPPEAALPRYTGGTSPRALAMFTEAAAALIGEHRITVLADLLVHRLQAIKELEALLAADVVPHATLMWGKSLLDESSPNFLGIYAGSASAPAVRTAIEEAPVLVTAGVVFTDMVSGFFSQRIDPARTIDVGQYQSSVAGEVFAPLEMGEALQALAAILTRRGVSSPPVASPPAEPLPPPPPREQPLTQKMVWDRVCTALTPGNVVLADQGTSFYGMADHRLPQGVTFIGQPLWGSIGYTLPAALGAAVAHPDRRTVLLIGDGAAQLTVQELGTFAREGLSPVIVVVNNDGYTVERAIHGETAPYNDIVGWKWTEVPNSLGVTDHLAFRVQTYGELDDALTAAARHQDRMVLVEVVLPRLEIPRLLVELVRPTSPDGSPRR

SEQ ID NO: 190 - protein, 555 aa, Mycobacterium smegmatis
MTDDGYTVGDYLLDRLAELGVTEVFGVPGDYQLEFLDHVVAHPRITWVGGANELNAGYAADGYGRLRGMAALVTTFGVGELSAANAIAGSYAEHVPVVHIVGAPSKDSQAARRIVHHTLGDGDFEHFLRMSREITCAQANLVPATATREIDRVLSEVHEQKRPGYLLIATDVARFPTEPPTAPLPRHSGGTSPRALSLFTEAATQLIGEHRLTVLADFLVHRMGCVEALNKLLTADTVPHATLMWGKSLVDESSPNFLGIYAGAASEGSVREVIEDAPVLVTAGVLFTDMVSGFFSQRIDPARTIDIGVNQSVVAGQVFAPLDMAAALDALASILAERGIESPALPPAPAPQRPAAPPRDAVLTQEALWDRLAEALTPGNVVLADQGTSFYGLAGHRLASGVTFIGQPLWASIGYTLPAALGAGLADRDRRTVLLIGDGAAQLTVQELGAFGREGLTPVVVVVNNNGYTVERAIHGVTARYNDITAWRWTELPAALGVPDALTFRCATYGELDDALTVAAETQDRMVFVEVMLERMDIPPLLGELAQSASAANAK

SEQ ID NO: 191 - protein, 574 aa, Mycobacterium kansasii
MVSAGRTVVFVTDRAAGPNEPVYTVGDYLLDRLAELGVSEIFGVPGDYNLEFLDHIVAHPAIRWVGNANELNAGYAADGYGRLRGMSAVVTTFGVGELSAANAIAGSYAEHVPVVHIVGGPSKDAQGTRRALHHSLGDGDFEHFFRISREITCAQANLMPATACREIDRVLCEVREQKRPGYLLLSTDVARFPTEPPGAPLPPYGGGTSPRALSLFTEAAAALIGEHQLTVLADLLVHRLRAVDELEALLAADVVPHATLMWGKSLLDESSPNFLGIYAGAASAARVRAAIEQAPVLVTAGVVFTDMVSGFFSQRIDPARTIDIGQYQSTVAGRVFAPLEMSAALRAIAEILTGRGITSPPVPAPDDHRPASTPQRDDPLTQRMLWDRVNDALTPGNVVLAEQGTSFYGMADHRLPHGVTFIGQPLWGSIGYTLPAALGAAVAHRDRRTVLLIGDGAAQLTVQEIGNFSREGLSPVIVVVNNDGYTIERAIHGETASYNDIAAWSWTAVPSALGVTDHLAFRARTYGELDDALTAAAAHRDRLVLVEAVLPRLEIPHLLSDLVAPTSSDGTARR

SEQ ID NO: 192 - protein, 569 aa, Mycobacterium leprae
MTAPKIEAVYTVGAYLLDRLAELGVTEIFGVPGDYTLEFLDHIVAHPTIRWVGNANELNAGYAADGYGRLRGISALVTTFGVGELSAANAIAGSYAEHVPVVHIVGAPPKDAQSTHRALHHSLGDGDFEHFIRISSEITCSQANLTTATACKEIDRVLSEVRKHKRPGYILLSTDVARFPTEPPAAPLPGHTDGTSPRALSLFIDAATKLIADKRMTVLADLLVHRLQVVKELETLLTADVVPYATLMWGKSLLDESSPNFLGIYAGAASTEAVRAAIEQAPVLVTAGVVFTDMVSGFFSQRIDPARTIDVGQYQSSVADKVFTPLEMGDALEALASILVRRGVSSPPVELPPGNPTADTPSPTQRLTQQILWDRLCAALTPGNVVLADQGTAFYGMVEHRLPRGVTFIGQPLWGSIGYTLPAALGAGLAHRNRRTVLLLGDGAAQLTIQELGSFYREGLSPVIVVVNNDGYTIERAIHGATAPYNNIARWRWTDIPGALGVANHSSFRAETYGELDEAFAVAAELKDQMVFVEVIVPKLDLPSLLTALTRPAQDSNRIFQLPNPGWDN

SEQ ID NO: 193 - protein, 560 aa, Mycobacterium tuberculosis
MTPQKSDACSDPVYTVGDYLLDRLAELGVSEIFGVPGDYNLQFLDHIVAHPTIRWVGSANELNAGYAADGYGRLRGMSAVVTTFGVGELSVTNAIAGSYAEHVPVVHIVGGPTKDAQGTRRALHHSLGDGDFEHFLRISREITCAQANLMPATAGREIDRVLSEVREQKRPGYILLSSDVARFPTEPPAAPLPRYPGGTSPRALSLFTKAAIELIADHQLTVLADLLVHRLQAVKELEALLAADVVPHATLMWGKSLLDESSPNFLGIYAGAASAERVRAAIEGAPVLVTAGVVFTDMVSGFFSQRIDPARTIDIGQYQSSVADQVFAPLEMSAALQALATILTGRGISSPPVVPPPAEPPPAMPARDEPLTQQMVWDRVCSALTPGNVVLADQGTSFYGMADHRLPQGVTFIGQPLWGSIGYTLPAAVGAAVAHPDRRTVLLIGDGAAQLTVQELGTFSREGLSPVIVVVNNDGYTVERAIHGETAPYNDIVSWNWTELPSALGVTNHLAFRAQTYGQLDDALTVAAARRDRMVLVEVVLPRLEIPRLLGQLVGSMAPQ

SEQ ID NO: 194 - protein, 563 aa, Mycobacterium parascrofulaceum
MLVTDAATGPVYTVGDYLLDRLAELGVTEIFGVPGDYNLEFLDHIVAHPAIRWVGNANELNAGYAADGYGRLRGMAAVVTTFGVGELSAANAIAGSYAEQVPVVHIVGGPSKDAQGTRRALHHSLGDGDFEHFFRVSREITCAQANLMPATARREIDRVLSEVREQKRPGYILLSTDVARFPTEPPRDPLPRYTGGTSPRALSLFVEAASRLIADHQLTVLADLLVHRLQVVKELEALLAADVVPYATLMWGKSLLDESSPNYLGIYAGSASAPAVRTAIEEAPVLVTAGVVFTDMVSGFFSQRIDPARTIDVGQYQSSVAGEVFAPLEMGAALEALATILTRRAVTSPPVASPPAEALPPPPPRDQPLTQEMLWDRLCTALTPGNVVLADQGTSFYGMADHRLPQGVTFIGQPLWGSIGYTLPAALGAAVAHPDRRTVLLIGDGAAQLTVQELGSFSREGLSPVIVVVNNDGYTVERAIHGETAPYNDIVNWKWTDIPGALGFTDHLAFRVRTYGELDDALTAAARHRDNMVLVEVVLPRLEIPPLLVELVQPMSPDGSVRR

SEQ ID NO: 195 - protein, 563 aa, Mycobacterium avium
MPVTDAATEPAYTVGDYLLDRLAELGVSEIFGVPGDYNLEFLDHIVAHPRLRWVGNANELNAGYAADGYGRLRGMSALVTTFGVGELSAANAVAGSYAEQVPVVHIVGGPSKDAQGTRRALHHSLGDGDFEHFFRVSREITCAQANLMPATARREIDRVLSEVREQKRPGYILLSTDVARFPTEPPEAALPRYTGGTSPRALAMFTEAAAALIGEHRITVLADLLVHRLQAIKELEALLAADVVPHATLMWGKSLLDESSPNFLGIYAGSASAPAVRTAIEEAPVLVTAGVVFTDMVSGFFSQRIDPARTIDVGQYQSSVAGEVFAPLEMGEALQALTAILTRRGVSSPPVASPPAEPLPPPPPREQPLTQKMVWDRVCTALTPGNVVLADQGTSFYGMADHRLPQGVTFIGQPLWGSIGYTLPAALGAAVAHPDRRTVLLIGDGAAQLTVQELGTFAREGLSPVIVVVNNDGYTVERAIHGETAPYNDIVGWKWTEVPNALGVTEHLAFRVQTYGELDDALTAAARHQDRMVLVEVVLPRLEIPRLLVELVRPTSPDGSPRR

SEQ ID NO: 196 - protein, 571 aa, Mycobacterium intracellulare
MDSAERTVVPVTDAATDPAYTVGDYLLDRLAELGVSEIFGVPGDYNLEFLDHIIAHPSLRWVGNANELNAGYAADGYGRLRGMSALVTTFGVGELSAANAIAGSYAEQVPVVHIVGGPSKDAQGTRRALHHSLGDGDFEHFFRVSREITCAQANLMPATARREIDRVLCEVREQKRPGYILLSTDVARFPTEPPEAPLPRYSGGTSPRALAMFVEAATELIGGHRLTVLADLLVHRLQAIKELEALLAADVVPHATLMWGKSLLDESSPNFLGIYAGSASAPAVRTAIEEAPVLVTAGVVFTDMVSGFFSQRIDPARTIDVGQYQSSVAGEVFAPLEMGAALEALATILARRGTASPPVASPPAAPLPPPPPRDQPLTQKMLWDRVCRALTPGNVVLADQGTSFYGMADHRLPHGVTFIGQPLWGSIGYTLPAALGAAVAHPDRRTVLLIGDGAAQLTVQELGTFSREGLSPVIVVVNNDGYTVERAIHGETAPYNDIVSWKWTDVPHALGVTDHLAFRVQTYGELDDALTAAAEHKDRMVFVEVVLPRLEIPHLLVELVQPTSPDGSPRR

SEQ ID NO: 197 - protein, 548 aa, Lactococcus lactis
MYTVGDYLLDRLHELGIEEIFGVPGDYNLQFLDQIISHKDMKWVGNANELNASYMADGYARTKKAAAFLTTFGVGELSAVNGLAGSYAENLPVVEIVGSPTSKVQNEGKFVHHTLADGDFKHFMKMHEPVTAARTLLTAENATVEIDRVLSALLKERKPVYINLPVDVAAAKAEKPSLPLKKENSTSNTSDQEILNKIQESLKNAKKPIVITGHEIISFGLEKTVTQFISKTKLPITTLNFGKSSVDEALPSFLGIYNGTLSEPNLKEFVESADFILMLGVKLTDSSTGAFTHHLNENKMISLNIDEGKIFNERIQNFDFESLISSLLDLSEIEYKGKYIDKKQEDFVPSNALLSQDRLWQAVENLTQSNETIVAEQGTSFFGASSIFLKSKSHFIGQPLWGSIGYTFPAALGSQIADKESRHLLFIGDGSLQLTVQELGLAIREKINPICFIINNDGYTVEREIHGPNQSYNDIPMWNYSKLPESFGATEDRVVSKIVRTENEFVSVMKEAQADPNRMYWIELILAKEGAPKVLKKMGKLFAEQNKS

SEQ ID NO: 198 - protein, 565 aa, Francisella novicida
MEKYITGEKLFDTSRNATNVAEYIVARLVDLGITHSFCIPGDFSFALARALINNPKLQNIVNANELNASYAADGYARVKGAAILSTTYAVGELSALNGVMGSKAENLVVFHLVGSPSDGAVGKKRQVHHTLGDGVFGNFFDLSASAACVSAVITPENARREMNRVIAEAFKYRKPAYISVSLDSGNRPVTDITPDGIDCSYLKSDSHQLELATNLVLEHLSKAKKVVAIPSIKLDRFGVTEKAIKLIEKLNIPFTIMPHDKSVISEAHPNYIGFYAGLLSDTNTAEIVEGADLIINLGDALWSDFNTAGFTNNLDLDKVLNLGPLFVEDKKNYLADVYLYELLDALLEKVESINYRPEYSRMKIQDTTVTKEKLTLKSLYTQVLKFLKNTDSFVVETGSSSLNMPYLQLPEGVKYYNQTLWGSIGWATPAALGVALANPNSRTILITGEGAHQLTLNELGVMGRYQVNPIIICINNDGFMIERALELDPDPSYDDLAQLNYKDLPKAFGCNDWLTIKVQTGKELAEALEKAREHQSGVYIEVITGRYDYGNTLNFFNTHLKEMYG

SEQ ID NO: 199 - protein, 565 aa, Francisella novicida
MKKYITGEKLFDTSKHATNVAEYIVARLVDLGITHSFCIPGDFSFALDRALINNPKLNNVVNANELNASYAADGYARVKGAAILSTTYAVGELSALNGVMGSKAENLVVFHLVGSPGDGAVGKKRQVHHTLGDGVFGNFFDLSASAACVSAVITPENARREMNRVIAEAFKYRKPAYISVSLDSGNRPVTDITPDDIDCSYLKSDSHQLELATNLVLEHLSKAKKVVAIPAIKLDRFGVTEKAIKLIEKLNIPFSIMPHDKSVISETHPNYVGFYAGLLSDTNTAEIVEGADLIINLGDALWSDFNTAGFTNNLDLNKVLNLGPLFVEDNKTYLADVYLSELLDALLEKVESINYRPNYSRMKIQDTTITKEKLTLRELYTQVLKFLENTDSLVVETGSSSLNMPKLPLPEGVKYFNQTLWGSIGWATPAALGVALANPDSRTILITGEGSHQLTLNELGVMGRYKINPIILCINNDGYMIERALELDPNPSYDDIAQLNYTKLPEAFGCNDWLAIRVKTSEELAEALKKAREHQSGVYIEVITGKYDYGNALDFFNNHLKEMYG

SEQ ID NO: 200 - protein, 565 aa, Francisella tularensis
MKKYITGEKLFDTSKHATNVAEYIVARLVDLGITHSFCIPGDFSFALDRALINNPKLNNVVNANELNASYAADGYARVKGAAILSTTYAVGELSALNGVMGSKAENLVVFHLVGSPGDGAVGKKRQVHHTLGDGVFGNFFDLSASAACVSAVITPENARREMNRVIAEAFKYRKPAYISVSLDSGNRPVTDITPDDIDCSYLKSDSHQLELATNLVLEHLSKAKKVVAIPAIKLDRFGVTEKAINLIEKLNIPFSIMPHDKSVISETHPNYVGFYAGLLSDTNTAEIVEGADLIINLGDALWSDFNTAGFTNNLDLNKVLNLGPLFVEDNKTYLADVYLSELLDALLEKVESINYRPNYSRMKIQDTTITKEKLTLRALYTQVLKFLENTDSLVVETGSSSLNMPKLPLPEGVKYFNQTLWGSIGWATPAALGVALANPDSRTILITGEGSHQLTLNELGVMGRYKINPIILCINNDGYMIERALELDPNPSYDDIAQLNYTKLPEAFGCNDWLAIRVKTSEELAEALKKAREHQSGVYIEVITGKYDYGNALDFFNNHLKEMYS

SEQ ID NO: 201 - protein, 565 aa, Francisella novicida
MKKYITGEKLFDTSKHATNVAEYIVARLVDLGITHSFCIPGDFSFALDRALINNPKLNNVVNANELNASYAADGYARVKGAAILSTTYAVGELSALNGVMGSKAENLVVFHLVGSPGDGAVGKKRQVHHTLGDGVFGNFFDLSASAACVSAVITPENARREMNRVIAEAFKYRKPAYISVSLDSGNRPVTDITPDDIDCSYLKSDSHQLELATNLVLEHLSKAKKVVAIPAIKLDRFGITEKAIKLIEKLNIPFSIMPHDKSVISETHPNYVGFYAGLLSDTNTAEIVEGADLIINLGDALWSDFNTAGFTNNLDLNKVLNLGPLFVEDNKTYLADVYLSELLDALLEKVESINYRPNYSRMQIQDATITKEKLTLRELYTQVLKFLENTDSLVVETGSSSLNMPKLPLPEGVKYFNQTLWGSIGWATPAALGVALANPDSRTILITGEGSHQLTLNELGVMGRYKINPIILCINNDGYMIERALELDPNPSYDDIAQLNYTKLPEAFGCNDWLAIRVKTSEELAKALKKAREHQSGVYIEVITGKYDYGNALDFFNNHLKEMYG

SEQ ID NO: 202 - protein, 565 aa, Francisella novicida
MKKYITGEKLFDTSKHATNVAEYIVARLVDLGITHSFCIPGDFSFALDRALINNPKLNNVVNANELNASYAADGYARVKGAAILSTTYAVGELSALNGVMGSKAENLVVFHLVGSPGDGAVGKKRQVHHTLGDGVFGNFFDLSASAACVSAVITPENARREMNRVIAEAFKYRKPAYISVSLDSGNRPVTDITPDDIDCSYLKSDSHQLELATNLVLEHLSKAKKVVAIPAIKLDRFGVTEKAIKLIEKLNIPFSIMPHDKSVISETHPNYVGFYAGLLSDTNTAEIVEDADLIINLGDALWSDFNTAGFTNNLDLNKVLNLGPLFVEDNKTYLADVYLSELLDALLEKVESINYRPNYSRMQIQDATITKEKLTLRELYTQVLKFLENTDSLVVETGSSSLNMPKLPLPEGVKYFNQTLWGSIGWATPAALGVALANPDSRTILITGEGSHQLTLNELGVMGRYKINPIILCINNDGYMIERALELDPNPSYDDIAQLNYTKLPEAFGCNDWLAIRVKTSEELAEALKKAREHQSGVYIEVITGKYDYGNALDFFNNHLKEMYG

SEQ ID NO: 203 - protein, 565 aa, Francisella tularensis
MKKYITGEKLFDTSKHATNVAEYIVARLVDLGITHSFCIPGDFSFALDRALINNPKLNNVVNANELNASYAADGYARVKGAAILSTTYAVGELSALNGVMGSKAENLVVFHLVGSPGDGAVGKKRQVHHTLGDGVFGNFFDLSASAACVSAVITPENARREMNRVIAEAFKYRKPAYISVSLDSGNRPVTDITPDDIDCSYLKSDSHQLELATNLVLEHLSKAKKVVAIPAIKLDRFGVTEKAIKLIEKLNIPFSIMPHDKSVISETHPNYVGFYAGLLSDTNTAEIVEDADLIINLGDALWSDFNTAGFTNNLDLNKVLNLGPLFVEDNKTYLADVYLSELLDALLEKVESINYRPNYSRMQIQDTTITKEKLTLRELYTQVLKFLENTDSLVVETGSSSLNMPKLPLPEGVKYFNQTLWGSIGWATPAALGVALANPDSRTILITGEGSHQLTLNELGVMGRYKINPIILCINNDGYMIERALELDPNPSYDDIAQLNYTKLPEAFGCNDWLAIKVKTSEELAEALKKAREHQSGVYIEVITGKYDYGNALDFFNNHLKEMYS

SEQ ID NO: 204 - protein, 565 aa, Francisella tularensis
MKKYITGEKLFDTSKHATNVAEYIVARLVDLGITHSFCIPGDFSFALDRALINNPKLNNVVNANELNASYAADGYARVKGAAILSTTYAVGELSALNGVMGSKAENLVVFYLVGSPGDGAVGKKRQVHHTLGDGVFGNFFDLSASAACVSAVITPENARREMNRVIAEAFKYRKPAYISVSLDSGNRPVTDITPDDIDCSYLKSDSHQLELATNLVLEHLSKAKKVVAIPAIKLDRFGVTEKAINLIEKLNIPFSIMPHDKSVISETHPNYVGFYAGLLSDTNTAEIVEGADLIINLGDALWSDFNTAGFTNNLDLNKVLNLGPLFVEDNKTYLADVYLSELLDALLEKVESINYRPNYSRMKIQDTTITKEKLTLRALYTQVLKFLENTDSLVVETGSSSLNMPKLPLPEGVKYFNQTLWGSIGWATPAALGVALANPDSRTILITGEGSHQLTLNELGVMGRYKINPIILCINNDGYMIERALELDPNPSYDDIAQLNYTKLPEAFGCNDWLAIRVKTSEELAEALKKAREHQSGVYIEVITGKYDYGNALDFFNNHLKEMYS

SEQ ID NO: 205 - protein, 565 aa, Francisella tularensis
MKKYITGEKLFDTSKHATNVAEYIVARLVDLGITHSFCIPGDFSFALDRALINNSKLNNVVNANELNASYAADGYARVKGAAILSTTYAVGELSALNGVMGSKAENLVVFHLVGSPGDGAVGKKRQVHHTLGDGVFGNFFDLSASAACVSAVITPENARREMNRVIAEAFKYRKPAYISVSLDSGNRPVTDITPDDIDCSYLKSDSHQLELATNLVLEHLSKAKKVVAIPAIKLDRFGVTEKAINLIEKLNIPFSIMPHDKSVISETHPNYVGFYAGLLSDTNTAEIVEGADLIINLGDALWSDFNTAGFTNNLDLNKVLNLGPLFVEDNKTYLADVYLSELLDALLEKVESINYRPNYSRMKIQDTTITKEKLTLRALYTQVLKFLENTDSLVVETGSSSLNMPKLPLPEGVKYFNQTLWGSIGWATPAALGVALANPDSRTILITGEGSHQLTLNELGVMGRYKINPIILCINNDGYMIERALELDPNPSYDDIAQLNYTKLPEAFGCNDWLAIRVKTSEELAEALKKAREHQSGVYIEVITGKYDYGNALDFFNNHLKEMYS

SEQ ID NO: 206 - protein, 565 aa, Francisella philomiragia
MSKNINGKKVFDTAKDATNVAEYVVSRLVDLGIDHSFSVPGDFAFALDHALINNPKLNNIVNANELNASYAADGFARVNGAAILCTTYAVGELSALNGVMGSKAENLVVFHLVGSPNDAAVGKKKQVHHTLGDGVFGNFFDLSASAACVSAIITPENARREMNRVIAEAFKYRKPAYISVSLDGGNRPVTDITPDDIDCSYLKTNPHQLELAVNLVLEHLSKAKKVVAIPAIKLDRFGVTEKAIKLIEKLNIPFAIMPHDKSVISETHPNYIGFYAGLLSDTNTAKIVEDADLVINLGDALWSDFNTAGFTNNLDLDKVLNLGPLFVEDKKTYLADIYLSELLDALLEKADSINYRPEYSRMTIQDAPITQENLTLSVLYTQVLKFLKNTDNLVVETGSSSLNMPKLPLPEGVKYYNQTLWGSIGWATPATLGVALANPDSRTILITGEGSHQLTLNELGVMGRYKTNPIILCINNDGFMVERALELDPDPSYDDLAQLNYKDLPKAFGCNDWLTIKVKTGEELAQALKNAREHKSGVYIEIITGKYDYSDSLEFYNKHLKEMYG

SEQ ID NO: 207 - protein, 565 aa, Francisella sp.
MSKNINGKKVFDTAKDATNVAEYVVSRLVDLGIDHSFSVPGDFAFALDHALINNPKLNNIVNANELNASYAADGFARVNGAAILCTTYAVGELSALNGVMGSKAENLVVFHLVGSPNDAAVGKKKQVHHTLGDGVFGNFFDLSASAACVSAVITPENARREMNRVIAEAFKYRKPAYISVSLDGGNRPVTDITPDNIDCSYLKTNPQQLELAVNLVLERLNKAKKVVAIPAIKLDRFGVTEKAIKLIEKLNIPFAIMPHDKSVISETHPNYIGFYAGLLSDTNTAEIVEDADLVINLGDALWSDFNTAGFTNNLDLDKVLNLGPLFVEDKKTYLTDIYLSELLDALLEKADSINYRPEYSRMTIQDTPITQENLTLSVLYTQVLKFLKNTDNLVVETGSSSLNMPKLPLPEGVKYHNQTLWGSIGWATPATLGVALANPDSRTVLITGEGSHQLTLNEIGVMGRYKINPIILCINNDGFMVERALELDPDPSYDDLAQLNYKDLPKAFGCSDWLTIKVKTGEELAQALKEAREHKSGVYIEIITGKYDYGNALDFFNSHLKEMYG

SEQ ID NO: 208 - protein, 565 aa, Francisella philomiragia
MSKNINGKKVSDTAKDATNVAEYVVSRLVDLGIDHSFSVPGDFAFALDHALINNPKLNNIVNANELNASYAADGFARVNGAAILCTTYAVGELSALNGVMGSKAENLVVFHLVGSPNDAAVGKKKQVHHTLGDGVFGNFFDLSASATCVSAIITPENARREMNRVIAEAFKYRKPAYISVSLDGGNRPVTDITPDDIDCSYLKTNPHQLDLAVNLVLEHLSKAKKVVAIPAIKLDRFGVTEKAIKLIEKLNIPFAIMPHDKSVISETHPNYIGFYAGLLSDTNTAKIVEDADLVINLGDALWSDFNTAGFTNNLDLDKVLNLGPLFVEDKKTYLADIYLSELLDALLEKADSINYRPEYSRMTIQDAPITQENLTLSVLYTQVLKFLKNTDNLVVETGSSSLNMPKLPLPEGVKYHNQTLWGSIGWATPATLGIALANPDSRTILITGEGSHQLTLNELGVMGRYKTNPIILCINNDGFMVERALELDPDPSYDDLAQLNYKDLPKAFGCNDWLTIKVKTGEGLAQALKNAREHKSGVYIEIITGKYDYSDSLEFYNKHLKEMYG

SEQ ID NO: 209 - protein, 547 aa, Beijerinckia indica
MTMTVIQFVLERLKAIGISDIFGVPGDYSFPVNDAICNDPHIRWIGCSNELNAAYAADGYARVKGVAALCTTYGVGELSALNGVAGAYAEHLPIFHLVGTPSMAIQSARAPMHHTLGNGEYDLFRRMTELVVCAYAVMTPQNVAFETERLIAEALFHRRPVYMAFPADLAEQPVLGTAEPLAAPRSNPDHLAQATTAILSALEKAETACVLPGNLIHRCGLQRTMQNIIDRSGLPFATMFMDKSVLDEHQPAFVGMYDGALMNDDVRQFVEDADCVLTIGTLMSDLNSGAFTARLDPARTITIAHHNVLCDGKTYIDVEMGDILRALAENVPHRGWKRMSAPSLGAAKGSGDDPIGVDALYPRWADFLSPGDILVAETGTASMGLGFARMPKGATFYNQTLWGSIGWATPAAVGAAIAAPGRRVVLVTGDGSHQMTATEIGLFGHLGLKPIVFVLNNNGYLIERLLCKNPEIAYNDIAPWRYSELPHALGCDGWLTARVTTCAELDAVLAKAKHAETGVYIEIVTDTYAASPLAMKLHENLKSLYKS

SEQ ID NO: 210 - protein, 550 aa, Desulfovibrio sp.
MAVTVLERLMERLKQIGITDVFGVPGDFSFALNDAVDNDPDIRWVGCCNELNAAYAADGYARIKGRAALCTTYGVGELSALCGVAGAYTEHLPVIHLVGMPSVSTQRARRIVHHTLGTGQFDAYADMTKPVVTASAVLTAENAACQIERVLEAALTRNRPVYLAIPQDHADAPLAGEPVCVPEAPQSDPEILAAAIEAIAEKVNAAGSAVVLAGYLIARLGLRPLATDLLTRTGLPFATMFMDKTALDETLPGYVGLYDGRIMNPEVRDFVEGCDCVLNLGALWSDFNTGAFTAKIDSRRMVAVMQHEVRVGHATFREVEMRDVLTGLARVLSPKPRAAIPGPKGLGEPRGGPDEAITPDYLYPRWEKFLREGDIVMAETGTVSMGLGFARMPTGAEFFNQTLWGSIGWATPAAFGAALAAPDRRTLLFTGEGSHQFTVQELGQFGRYGLKPIVFCLNNDGYLIERLLCKDPMSSYNDLAPWNYTQLPAAFGMPDWYTAKVTTNRELEEALSKAESCGTGAYVEVVMDKMAASPLAQKLGESIKTLYGNK

SEQ ID NO: 211 - protein, 550 aa, Desulfovibrio sp.
MVVTVLERLMERLKQIGITDVFGVPGDFSFALNDAVDNDPDIRWVGCCNELNAAYAADGYARIKGRAALCTTYGVGELSALCGVAGAYTEHLPVIHLVGMPGVSTQRARRIVHHTLGTGEFDAYADMTKPVVAASAVLTAENAACQIERVLEAALTRNRPVYLAIPQDHADAPLAGEPVCVPEAPQSDPEILAAAIEAIAEKVDAAGSAVVLAGYLIARLGLRPLATDLLARTGLPFATMFMDKTALDETLPGYVGLYDGRIMNPEVRDFVEGCDCVLNLGALWSDFNTGAFTAKIDSRRMVAVMQHEVRVGHATFREVEMRDVLTGLARVLSPKPGGAVPRPKGLGEPKGGPDEAITPDYLYPRWEKFLREGDIVVAETGTVSMGLGFARMPAGAEFFNQTLWGAIGWATPAAFGAAMAAPDRRTLLFTGEGSHQMTVQELGQFGRYGLKPIVFCLNNDGYLIERLLCKDPMSSYNDLAPWNYTQLPAAFGMPDWYTAKVTTNRELEEALSKAESCGTGAYVEVVMDRMAASPLAQKLGESIKTLYGNK

SEQ ID NO: 212 - protein, 548 aa, Edwardsiella tarda
MSTTVIEYVLSRLYELGIHDIFGVPGDYAFPIEDAICADKRLRWIGNCNELNAAYAADAYARTQGLAALSTTFGVGELSAINGIAGACAESVTLFHLVGMPASHVQAQGERVHHTLGNGYFTAFYEATASFVCARAIMTPENCIAETERLIAAALRYRKPVYMAFPSDYATMPIVVSAAPQPVAPVSDPLTLNAVIDVIAERLNNSDSVCALPGIYLARHGAQKAATALIDAANLPFATMMMDKCVIDESHPNYVGMYVGQLMDQRVRQFVESSDCVLQIGTIMSDFNTGAFTSNLDEAQCISVEPESVRIGKAVYENVLMKDVLNGLVGRVTRRARRHDMPTVQGIPAVSGSGKLTAEYLYARWQQMLKPNDRLVAETGTTSMGLAFAQMPQGAVFYQQTLWGSIGWATPAAFGVAMAEPEKRTILITGEGSHQMTAQEIGQFYRFGLKPLIFVVNNSGYLVERMLCKDGDIYYNDLAQWDYSQLPAGLGCRDWFTARVTTCEALDEAIRHAEAGDCGAYIEVVTDKYVTSELLEKMHGALTSLYSA

SEQ ID NO: 213 - protein, 548 aa, Edwardsiella ictaluri
MSTTVIEYVLSRLYDLGIHDIFGVPGDYAFPIEDAICVDERLRWIGNCNELNAAYAADAYARTHGLAALSTTFGVGELSAINGIAGACAESVTLFHLVGMPASHVQAAGACVHHTLGNGDFTSFYEATDSFVCARAILTPENCIAETERLIEAALRYRKPVYMGFPSDYAMMPIVADTAQPAAEPVSDPQILNEVIDVIAERLNNSDSVCALPGIYLVRHGVQQEATALIDAANLPFATMIMDKCVIDESHPNYVGMYVGQLMDQRVRQFVESSDCVLKIGTIMSDLNTGAYTSHLDEAQCISVEPTSVHIGKSVYENVLMKDVLSGLIGRVTRRARRHDMPPVQGIPVVSGSGKLTAEYLYSRWQQMLKPNDLLVAETGTTSMGLAFAKMPQGAMFYQQTLWGSIGWATPAAFGVAMAEPEKRTILITGEGSHQMTVQEIGQFYRFGLKPLIFVVNNDGYLVERMLCKDGDIYYNDLTQWNYSQLPAGLGCRDWFTARVTTCEALDEAIRHAEAGDCGAYIEVVTDKYVTSELLEKLHGALTSLYSA

SEQ ID NO: 214 - protein, 552 aa, Singulisphaera acidiphila
MSEQPTVADYIVRRFAREGITDCFGVAGDFAFKLCDAVANSEAIRWIGCSNELDAAYAADGYARVRGCSMLMTTYAVGELSALNGVMGAKAERSCVFHVVGMPTMRKQRVGQIVHHTLGDGEFQNFANISAQAACVSAVITPDNCTHEMERLIATARAESRPAYILVAGDYAVTPVTGSAPTPYPKPASGPDLARAVAAIAERVETARSLVVLPAYTVSRFKLQDKLRALIEALGCPFAAMAMDKGILTEAHPQFVGIYSGGASSPAVLEAVEGADVVIDAGGVSFNEINTSAYTSRIDPGKLVTIGVDHVRVADRIYNPVRMGDVFDGLAGAIKKKFGYSAPPREVPARPGGKPDDPITAVNMYPRFRDFLKPRDRIVLESGSMSSGMVPLPLPEDAEVQLQPLWGSIGWATGATLGIALADASRRTLLFTGEGSHQMTAADVGTMGRHGLKPVIFVLNNGGYMVERALEADPDWVYNDLAPWNYHALPAALGCRGWFTAKVTTLGELDAALAKAATGESASYIEIVGGRMDLPAGLAMAHQRLDALYGNG

SEQ ID NO: 215 - protein, 7 aa, Unknown
  Acetolactate synthase motif
  misc_feature (5)..(5): Xaa may be Ala, Cys or Val
  misc_feature (6)..(6): Xaa may be Thr or Ser
SGPGXXN

SEQ ID NO: 216 - protein, 6 aa, Unknown
  Acetolactate synthase motif
  misc_feature (2)..(2): Xaa may be any naturally occurring amino acid
  misc_feature (3)..(3): Xaa may be Pro or Ala
  misc_feature (5)..(5): Xaa may be any naturally occurring amino acid
  misc_feature (6)..(6): Xaa may be Val, Ala or Thr
GXXGXX

SEQ ID NO: 217 - protein, 15 aa, Unknown
  Acetolactate synthase motif
  misc_feature (2)..(2): Xaa may be any naturally occurring amino acid
  misc_feature (3)..(3): Xaa may be Gln or Gly
  misc_feature (4)..(4): Xaa may be Thr or Ala
  misc_feature (5)..(5): Xaa may be Leu or Met
  misc_feature (7)..(7): Xaa may be Tyr, Phe or Trp
  misc_feature (8)..(8): Xaa may be Ala or Gly
  misc_feature (9)..(9): Xaa may be any naturally occurring amino acid
  misc_feature (10)..(10): Xaa may be Pro or Gly
  misc_feature (11)..(11): Xaa may be Trp or Ala
  misc_feature (13)..(13): Xaa may be any naturally occurring amino acid
  misc_feature (14)..(14): Xaa may be Gly or Thr
  misc_feature (15)..(15): Xaa may be Ala or Val
GXXXXGXXXXXAXXX

SEQ ID NO: 218 - protein, 5 aa, Unknown
  Acetolactate synthase motif
  misc_feature (3)..(3): Xaa may be Gly or Ala
  misc_feature (4)..(4): Xaa may be Gly, Ser or Cys
GDXXF

SEQ ID NO: 219 - protein, 6 aa, Unknown
  Ketol-acid reductoisomerase motif
  misc_feature (2)..(2): Xaa may be Tyr, Cys or Trp
  misc_feature (4)..(4): Xaa may be any naturally occurring amino acid
  misc_feature (6)..(6): Xaa may be Gly or Ala
GXGXQX

SEQ ID NO: 220 - protein, 5 aa, Unknown
  Ketol-acid reductoisomerase motif
  misc_feature (1)..(1): Xaa may be Phe, Tyr or Leu
  misc_feature (2)..(2): Xaa may be Ser or Ala
  misc_feature (5)..(5): Xaa may be Phe or Leu
XXHGX

SEQ ID NO: 221 - protein, 6 aa, Unknown
  Ketol-acid reductoisomerase motif
  misc_feature (2)..(2): Xaa may be Val, Ile or Phe
  misc_feature (3)..(3): Xaa may be Met, Leu or Ala
  misc_feature (4)..(4): Xaa may be Ala or Cys
VXXXPK

SEQ ID NO: 222 - protein, 11 aa, Unknown
  Ketol-acid reductoisomerase motif
  misc_feature (2)..(2): Xaa may be Leu or Ile
  misc_feature (3)..(3): Xaa may be any naturally occurring amino acid
  misc_feature (6)..(6): Xaa may be Gln or Arg
  misc_feature (7)..(8): Xaa may be any naturally occurring amino acid
  misc_feature (10)..(10): Xaa may be any naturally occurring amino acid
DXXGEXXXLXG

SEQ ID NO: 223 - protein, 7 aa, Unknown
  Ketol-acid reductoisomerase motif
  misc_feature (2)..(2): Xaa may be Asp, Asn or Thr
  misc_feature (5)..(5): Xaa may be Glu, Gln or Arg
  misc_feature (6)..(6): Xaa may be any naturally occurring amino acid
SXTAXXG

SEQ ID NO: 224 - protein, 9 aa, Unknown
  Dihydroxy acid dehydratase motif
  misc_feature (3)..(3): Xaa may be any naturally occurring amino acid
  misc_feature (6)..(7): Xaa may be any naturally occurring amino acid
SLXSRXXIA

SEQ ID NO: 225 - protein, 7 aa, Unknown
  Dihydroxy acid dehydratase motif
  misc_feature (4)..(5): Xaa may be any naturally occurring amino acid
CDKXXPG

SEQ ID NO: 226 - protein, 10 aa, Unknown
  Dihydroxy acid dehydratase motif
  misc_feature (2)..(2): Xaa may be any naturally occurring amino acid
  misc_feature (4)..(4): Xaa may be any naturally occurring amino acid
  misc_feature (6)..(7): Xaa may be any naturally occurring amino acid
GXCXGXXTAN

SEQ ID NO: 227 - protein, 5 aa, Unknown
  Dihydroxy acid dehydratase motif
GGSTN

SEQ ID NO: 228 - protein, 11 aa, Unknown
  Dihydroxy acid dehydratase motif
  misc_feature (3)..(3): Xaa may be any naturally occurring amino acid
  misc_feature (5)..(5): Xaa may be any naturally occurring amino acid
  misc_feature (10)..(10): Xaa may be any naturally occurring amino acid
GPXGXPGMRXE

SEQ ID NO: 229 - protein, 10 aa, Unknown
  Dihydroxy acid dehydratase motif
  misc_feature (3)..(3): Xaa may be any naturally occurring amino acid
  misc_feature (8)..(8): Xaa may be any naturally occurring amino acid
ALXTDGRXSG

SEQ ID NO: 230 - protein, 7 aa, Unknown
  Dihydroxy acid dehydratase motif
  misc_feature (3)..(4): Xaa may be any naturally occurring amino acid
GHXXPEA

SEQ ID NO: 231 - protein, 6 aa, Unknown
  Alcohol dehydrogenase motif
  misc_feature (2)..(2): Xaa may be His or Gly
  misc_feature (3)..(3): Xaa may be Thr or Ser
  misc_feature (5)..(5): Xaa may be Leu or Ile
CXXDXH

SEQ ID NO: 232 - protein, 8 aa, Unknown
  Alcohol dehydrogenase motif
  misc_feature (4)..(5): Xaa may be any naturally occurring amino acid
  misc_feature (7)..(7): Xaa may be any naturally occurring amino acid
GHEXXGXV

SEQ ID NO: 233 - protein, 7 aa, Unknown
  Alcohol dehydrogenase motif
  misc_feature (1)..(1): Xaa may be Leu or Val
  misc_feature (2)..(2): Xaa may be Gln, Lys or Glu
  misc_feature (3)..(3): Xaa may be Val, Ile or Lys
  misc_feature (5)..(5): Xaa may be Asp or Gln
  misc_feature (6)..(6): Xaa may be Arg or His
  misc_feature (7)..(7): Xaa may be Val or Ala
XXXGXXX

SEQ ID NO: 234 - protein, 7 aa, Unknown
  Alcohol dehydrogenase motif
  misc_feature (2)..(3): Xaa may be any naturally occurring amino acid
  misc_feature (5)..(6): Xaa may be any naturally occurring amino acid
CXXCXXC

SEQ ID NO: 235 - protein, 6 aa, Unknown
  Alcohol dehydrogenase motif
  misc_feature (1)..(1): Xaa may be Cys or Ala
  misc_feature (2)..(2): Xaa may be Ala, Gly or Asp
  misc_feature (3)..(3): Xaa may be Gly or Ala
  misc_feature (4)..(4): Xaa may be any naturally occurring amino acid
  misc_feature (6)..(6): Xaa may be Thr or Val
XXXXTX

SEQ ID NO: 236 - protein, 6 aa, Unknown
  Alcohol dehydrogenase motif
  misc_feature (2)..(2): Xaa may be Leu, Ala or Cys
  misc_feature (4)..(4): Xaa may be Gly or Pro
  misc_feature (5)..(5): Xaa may be Leu, Ile or Val
GXGXXG

SEQ ID NO: 237 - protein, 7 aa, Unknown
  Keto-isovalerate decarboxylase motif
SQFVIMF

SEQ ID NO: 238 - protein, 7 aa, Unknown
  PDC substrate specificity motif
FTAIIQT

SEQ ID NO: 239 - protein, 7 aa, Melissococcus plutonias
LQFIIMA

SEQ ID NO: 240 - protein, 7 aa, Unknown
  KIV/pyruvate specificity motif
FTSILFL

SEQ ID NO: 241 - protein, 563 aa, Saccharomyces cerevisiae
MSEITLGKYLFERLKQVNVNTVFGLPGDFNLSLLDKIYEVEGMRWAGNANELNAAYAADGYARIKGMSCIITTFGVGELSALNGIAGSYAEHVGVLHVVGVPSISAQAKQLLLHHTLGNGDFTVFHRMSANISETTAMITDIATAPAEIDRCIRTTYVTQRPVYLGLPANLVDLNVPAKLLQTPIDMSLKPNDAESEKEVIDTILALVKDAKNPVILADACCSRHDVKAETKKLIDLTQFPAFVTPMGKGSIDEQHPRYGGVYVGTLSKPEVKEAVESADLILSVGALLSDFNTGSFSYSYKTKNIVEFHSDHMKIRNATFPGVQMKFVLQKLLTTIADAAKGYKPVAVPARTPANAAVPASTPLKQEWMWNQLGNFLQEGDVVIAETGTSAFGINQTTFPNNTYGISQVLWGSIGFTTGATLGAAFAAEEIDPKKRVILFIGDGSLQLTVQEISTMIRWGLKPYLFVLNNDGYTIEKLIHGPKAQYNEIQGWDHLSLLPTFGAKDYETHRVATTGEWDKLTQDKSFNDNSKIRMIEIMLPVFDAPQNLVEQAKLTAATNAKQ

SEQ ID NO: 242 - protein, 563 aa, Saccharomyces cerevisiae
MSEITLGKYLFERLSQVNCNTVFGLPGDFNLSLLDKLYEVKGMRWAGNANELNAAYAADGYARIKGMSCIITTFGVGELSALNGIAGSYAEHVGVLHVVGVPSISSQAKQLLLHHTLGNGDFTVFHRMSANISETTAMITDIANAPAEIDRCIRTTYTTQRPVYLGLPANLVDLNVPAKLLETPIDLSLKPNDAEAEAEVVRTVVELIKDAKNPVILADACASRHDVKAETKKLMDLTQFPVYVTPMGKGAIDEQHPRYGGVYVGTLSRPEVKKAVESADLILSIGALLSDFNTGSFSYSYKTKNIVEFHSDHIKIRNATFPGVQMKFALQKLLDAIPEVVKDYKPVAVPARVPITKSTPANTPMKQEWMWNHLGNFLREGDIVIAETGTSAFGINQTTFPTDVYAIVQVLWGSIGFTVGALLGATMAAEELDPKKRVILFIGDGSLQLTVQEISTMIRWGLKPYIFVLNNNGYTIEKLIHGPHAEYNEIQGWDHLALLPTFGARNYETHRVATTGEWEKLTQDKDFQDNSKIRMIEVMLPVFDAPQNLVKQAQLTAATNAKQ

SEQ ID NO: 243 - protein, 563 aa, Saccharomyces cerevisiae
MSEITLGKYLFERLKQVNVNTIFGLPGDFNLSLLDKIYEVDGLRWAGNANELNAAYAADGYARIKGLSVLVTTFGVGELSALNGIAGSYAEHVGVLHVVGVPSISAQAKQLLLHHTLGNGDFTVFHRMSANISETTSMITDIATAPSEIDRLIRTTFITQRPSYLGLPANLVDLKVPGSLLEKPIDLSLKPNDPEAEKEVIDTVLELIQNSKNPVILSDACASRHNVKKETQKLIDLTQFPAFVTPLGKGSIDEQHPRYGGVYVGTLSKQDVKQAVESADLILSVGALLSDFNTGSFSYSYKTKNVVEFHSDYVKVKNATFLGVQMKFALQNLLKVIPDVVKGYKSVPVPTKTPANKGVPASTPLKQEWLWNELSKFLQEGDVIISETGTSAFGINQTIFPKDAYGISQVLWGSIGFTTGATLGAAFAAEEIDPNKRVILFIGDGSLQLTVQEISTMIRWGLKPYLFVLNNDGYTIEKLIHGPHAEYNEIQTWDHLALLPAFGAKKYENHKIATTGEWDALTTDSEFQKNSVIRLIELKLPVFDAPESLIKQAQLTAATNAKQ

SEQ ID NO: 244 - protein, 563 aa, Vanderwaltozyma polyspora
MSEITLGRYLFERLKQVQVQTIFGLPGDFNLSLLDKIYEVPGMRWAGNANELNAAYAADGYARIKGMACLITTFGVGELSALNGIAGSYAEHVGVLHVVGVPSLSSQAKQLLLHHTLGNGDFTVFHRMSACISETTAMITDIANAPAEIDRCIRTTYITQRTVYLGLPANMVDLMVPADLLKTPIDLSLKPNDPEAETEVLDTILAMVKEAKNPIILADACASRHDVKAETKQLIDTTQFPCFVTPMGKGSIDEQHPRFGGVYVGTLSRPEVKAAVESADLILSVGALLSDFNTGSFSYSYQTKNVVEFHSDHTKIKKASFPGVQMKFVLQKLVAQIGAAVKDYKPVAAPALPASNAECPASTPLKQEWLWNQVGKFLQEGDIVLTETGTSAFGINQTHFPNNTYGISQVLWGSIGFTGGATLGAAFAAEEIDPKKRTIVFIGDGSLQLTVQEISTMIRWNLKPYIFVLNNDGYTIEKLIHGPTAQYNEIQNWKHLDILPTFGAKDYEAIRVATTGEFNKLCEDKAFNENSKIRMIEIMLPVMDAPSNLVAQAKLTASINAKQ

SEQ ID NO: 245 - protein, 593 aa, Kluyveromyces thermotolerans
MSDLILYCDFYKTRNLNSNRVSQNKPEITMSEITLGRYVFERLKQVDVTTVFGLPGDFNLRLLDEIYEVEGMRWAGNCNELNASYAADAYARIKGMSCLITTFGVGELSALNGIAGSYAEHVGVLHIVGVPSVSAQAKQLLLHHTLGNGDFTVFHRMSANISETTAMITDLATAPSEIDRCIRTTYIRQRPVYLGLPSNFVDQMVPASLLDTPIDLALKPNDQQAEEEVISTLLEMIKDAKNPVILADACASRHDVKAETKKLIDITQFPSFVTPMGKGSIDEKHPRFGGVYVGTLSSPAVKEAVESADLVLSVGALLSDFNTGSFSYSYKTKNVVEFHSDHIKIRNATFPGVQMKFVLQSLLNKVGAVVKDYKPVPVPELPAPNAAVDPSTPLKQQWLWNQVGQFLQEGDIVLTETGTSAFGINQTHFPNNTYGISQVLWGSIGYATGACLGAVMAAEELDKSKRVILFTGEGSLQLTAQEISTMVRWNLKPYLFVLNNKGYTIEKLIHGPTAEYNEIQNWNHLDLLPTFGAKDYEAIRVSTTGEWNKLAEDKDFNKNSKIRLIELMLPVMDAPESLVKQAQLTAATNAKSA

SEQ ID NO: 246 - protein, 563 aa, Saccharomyces bayanus
MSEITLGKYLFERLNQVNVNTVFGLPGDFNLSLLDKIYEVEGMRWAGNANELNAAYAADGYARIKGMSCIITTFGVGELSALNGIAGSYAEHVGVLHVVGVPSISAQAKQLLLHHTLGNGDFTVFHRMSANISETTAMITDIATAPAEIDRCIRTTYVTQRPVYLGLPANLVDLNVPAKLLETPIDMSLKPNDAESEKEVIDTILALVKDAKNPIILADACCSRHDVKAETKKLIDLTQFPSFVTPMGKGSIDEKHPRYGGVYVGTLSKPEVKKAVESADLILSVGALLSDFNTGSFSYSYKTKNIVEFHSDHMKIRNATFPGVQMKFVLQKLLTTVADAAKGYKPVAVPAPTPANAAVPASTPLKQEWMWNQLGEFLQEGDVVIAETGTSAFGINQVAFPNNTYGISQVLWGSIGFTTGATLGAAFAAEEIDPKKRVILFIGDGSLQLTVQEISTMIRWGLKPYLFVLNNDGYTIEKLIHGPKAQYNEIQNWDHLSLLPTFGAKDYETHRVATTGEWDKLTQDKSFNENSKIRMIEIMLPVFDAPQNLVEQAKLTAATNAKQ

SEQ ID NO: 247 - protein, 563 aa, Kluyveromyces lactis
MSEITLGRYLFERLKQVEVQTIFGLPGDFNLSLLDNIYEVPGMRWAGNANELNAAYAADGYARLKGMSCIITTFGVGELSALNGIAGSYAEHVGVLHVVGVPSVSSQAKQLLLHHTLGNGDFTVFHRMSSNISETTAMITDINTAPAEIDRCIRTTYVSQRPVYLGLPANLVDLTVPASLLDTPIDLSLKPNDPEAEEEVIENVLQLIKEAKNPVILADACCSRHDAKAETKKLIDLTQFPAFVTPMGKGSIDEKHPRFGGVYVGTLSSPAVKEAVESADLVLSVGALLSDFNTGSFSYSYKTKNIVEFHSDYTKIRSATFPGVQMKFALQKLLTKVADAAKGYKPVPVPSEPEHNEAVADSTPLKQEWVWTQVGEFLREGDVVITETGTSAFGINQTHFPNNTYGISQVLWGSIGFTTGATLGAAFAAEEIDPKKRVILFIGDGSLQLTVQEISTMIRWGLKPYLFVLNNDGYTIERLIHGETAQYNCIQNWQHLELLPTFGAKDYEAVRVSTTGEWNKLTTDEKFQDNTRIRLIEVMLPTMDAPSNLVKQAQLTAATNAKN

SEQ ID NO: 248 - protein, 586 aa, Ashbya gossypii
MVSGLSKKKTTAKQLSKLTINTMSEITLGRYLFERLRQIEVQTIFGLPGDFNLSLLDKIYEVEGMRWAGNANELNAAYAADGYARLKGMSCLITTFGVGELSALNGIAGSYAEHVGVLHVVGVPSISAQAKQLLLHHTLGNGDFTVFHRMSANISGTTAMISDITSAPAEIDRCIRTCYITQRPVYLGLPANMVDLKVPASLLETPIDLNLKPNDPEAEAEVVETVLEMIAAAKNPVILSDACASRHDVKAETMKLIDVTQFPAFVTPMGKGSIYEQHPRFGGVYVGTLSSPEVKEAVESADLVLSVGALLSDFNTGSFSYSYKTKNVVEFHSDHIKIRNATFPGVQMKYVLRKLVDNVAEVIKSYVPVPVPSKPANNEEIDSATPLKQEWLWNQVGKFLREGDVVITETGTSAFGINQTHFPNNTYGISQVLWGSIGFTTGACLGAAFAAEELDPNRRVILFIGDGSLQLTVQEISTMVRWGLKPYLFVLNNDGYTIERLIHGETAQYNDIQPWQHLNLLPTFGAKDYEAVRVSTTGEWDALTQDKAFNENSKIRMIEVMLPVMDAPSNLVKQAELTAATNAKQE

SEQ ID NO: 249 - protein, 564 aa, Kluyveromyces waltii
MSEITLGRYLFERLRQVECNTIFGLPGDFNLRLLDEIYETEGMRWAGNANELNAAYAADAYARIKGMSCLITTFGVGELSALNGIAGSYAEHVGVLHVVGVPSISAQAKQLLLHHTLGNGDFTVFHRMSANISETTAMISDLATAPAEIDRCIRTTYVRQRPVYLGLPSNFVDQMVPASLLETPIDLSLKPNDAAAEQEVVSTVLDLIKNAKNPVILADACASRHDVKAETKKLIDVTQFPSFVTPMGKGSIDEKHPRFGGVYVGTLSSPAVKEAVESSDLILSVGALLSDFNTGSFSYSYKTKNIVEFHSDHIKIRNATFPGVQMKFVLQKLLTQVGDVVKDYKPVAIPEIPGPNAAVDDSTPLKQQWLWNQVGKFLQEGDVVITETGTSAFGINQTHFPNNTYGISQVLWGSIGFTTGATLGAAFAAEELDKNKRVILFIGDGSLQLTVQEISTMIRWGLKPYLFVLNNNGYTIEKLIHGEFAQYNEIQPWNHLDLLPTFGAKDYETVRVATTGEWNKLAEDQEFNKNSKIRMIEVMLPVMDAPESLVKQAQLTAATNAKSA

SEQ ID NO: 250 - protein, 564 aa, Candida glabrata
MSEITLGRYLFERLNQVDVKTIFGLPGDFNLSLLDKIYEVEGMRWAGNANELNAAYAADGYARIKGMSCIITTFGVGELSALNGIAGSYAEHVGVLHVVGVPSISSQAKQLLLHHTLGNGDFTVFHRMSANISETTAMVTDIATAPAEIDRCIRTTYITQRPVYLGLPANLVDLKVPAKLLETPIDLSLKPNDPEAETEVVDTVLELIKAAKNPVILADACASRHDVKAETKKLIDATQFPSFVTPMGKGSIDEQHPRFGGVYVGTLSRPEVKEAVESADLILSVGALLSDFNTGSFSYSYKTKNIVEFHSDYIKIRNATFPGVQMKFALQKLLNAVPEAIKGYKPVPVPARVPENKSCDPATPLKQEWMWNQVSKFLQEGDVVITETGTSAFGINQTPFPNNAYGISQVLWGSIGFTTGACLGAAFAAEEIDPKKRVILFIGDGSLQLTVQEISTMIRWGLKPYLFVLNNDGYTIERLIHGEKAGYNDIQNWDHLALLPTFGAKDYENHRVATTGEWDKLTQDKEFNKNSKIRMIEVMLPVMDAPTSLIEQAKLTASINAKQE

SEQ ID NO: 251 - protein, 563 aa, Torulaspora delbrueckii
MSEITLGRYLFERLKQVDTNTIFGLPGDFNLSLLDKIYEVPGMRWAGNANELNAAYAADGYARVKGMAALVTTFGVGELSALNGIAGSYAEHVGVLHIVGVPSISSQAKQLLLHHTLGNGDFTVFHRMSANISETTAMITDINSAPAEIDRCIRTTYVSQRPVYLGLPANLVDLKVPASLLDTPIDLSLKANDAEAEQEVVDDVLALIKAAKNPVILADACCSRHDVKDETRKLIDITQFPSFVTPMGKGSIDEQNPRFGGVYVGTLSSPEVKEAVESADLILSVGALLSDFNTGSFSYSYKTKNIVEFHSDYIKIRNATFPGVQMKFALQKLLAKVGDVAKDYKPVQVPARTPENAATADSTPLKQQWIWNQVGKFLQEGDVVITETGTSAFGINQSHFPNKTYGISQVLWGSIGFTTGATLGAAFAAEEIDPKKRVILFIGDGSLQLTVQEISTMVRWGLKPYLFVLNNDGYTIERLIHGEKAQYNDIQPWKNLDLLPTFGAKDYETHRVSTTGEWNKLTTDSEFNKNSKIRMIEVMLPVMDAPSSLVAQAQLTASINAKN

SEQ ID NO: 252 - protein, 7 aa, Lactococcus lactis
SQFVIMF

SEQ ID NO: 253 - protein, 7 aa, Staphylococcus epidermidis
SQFVIIF

SEQ ID NO: 254 - protein, 7 aa, Macrococcus caseolyticus
SQFVIIF

SEQ ID NO: 255 - protein, 7 aa, Bacillus megaterium
SQFVILF

SEQ ID NO: 256 - protein, 7 aa, Staphylococcus saprophyticus
SQFVIIF

SEQ ID NO: 257 - protein, 7 aa, Bacillus cereus
TQFVILF

SEQ ID NO: 258 - protein, 7 aa, Serratia odorifera
TQSVIVI

SEQ ID NO: 259 - protein, 7 aa, Pectobacterium carotovorum
TQCVIIL

SEQ ID NO: 260 - protein, 7 aa, Serratia sp.
TQCVIVI

SEQ ID NO: 261 - protein, 7 aa, Erwinia pyrifoliae
SQAVIVL

SEQ ID NO: 262 - protein, 7 aa, Klebsiella pneumoniae
TQAVIVL

SEQ ID NO: 263 - protein, 5 aa, Serratia sp.
SNGII

SEQ ID NO: 264 - protein, 7 aa, Acinetobacter baumannii
VVNIIFI

SEQ ID NO: 265 - protein, 5 aa, Francisella sp.
FTSIL

SEQ ID NO: 266 - protein, 7 aa, Schizosaccharomyces pombe
FTNIIQT

SEQ ID NO: 267 - protein, 7 aa, Acetobacter pasteurianus
YTWIIWV

SEQ ID NO: 268 - protein, 4 aa, Unknown
  PDC design palette
ASCF

SEQ ID NO: 269 - protein, 5 aa, Unknown
  PDC design palette
QMILV

SEQ ID NO: 270 - protein, 5 aa, Unknown
  PDC design palette
TVFIL

SEQ ID NO: 271 - protein, 7 aa, Lactococcus lactis
SQFVIMF

SEQ ID NO: 272 - protein, 7 aa, Lactococcus lactis
SQFVIMF

SEQ ID NO: 273 - protein, 7 aa, Lactococcus lactis
SQFVIMF

SEQ ID NO: 274 - protein, 7 aa, Lactococcus lactis
SQFVIMF

SEQ ID NO: 275 - protein, 7 aa, Staphylococcus epidermidis
SQFVIIF

SEQ ID NO: 276 - protein, 7 aa, Staphylococcus epidermidis
SQFVIIF

SEQ ID NO: 277 - protein, 7 aa, Staphylococcus epidermidis
SQFVIIF

SEQ ID NO: 278 - protein, 7 aa, Staphylococcus epidermidis
SQFVIIF

SEQ ID NO: 279 - protein, 7 aa, Macrococcus caseolyticus
SQFVIIF

SEQ ID NO: 280 - protein, 7 aa, Bacillus megaterium
SQFVILF

SEQ ID NO: 281 - protein, 7 aa, Staphylococcus saprophyticus
SQFVIIF

SEQ ID NO: 282 - protein, 7 aa, Staphylococcus hominis
SQFVIIF

SEQ ID NO: 283 - protein, 7 aa, Staphylococcus haemolyticus
SQFVIIF

SEQ ID NO: 284 - protein, 7 aa, Staphylococcus hominis
SQFVIIF

SEQ ID NO: 285 - protein, 7 aa, Staphylococcus lugdunensis
SQFVIIF

SEQ ID NO: 286 - protein, 7 aa, Staphylococcus capitis
SQFVIIF

SEQ ID NO: 287 - protein, 7 aa, Staphylococcus epidermidis
SQFVIIF

SEQ ID NO: 288 - protein, 7 aa, Staphylococcus epidermidis
SQFVIIF

SEQ ID NO: 289 - protein, 7 aa, Staphylococcus carnosus
SQFVIIF

SEQ ID NO: 290 - protein, 7 aa, Staphylococcus caprae
SQFVIIF

SEQ ID NO: 291 - protein, 7 aa, Staphylococcus aureus
SQFVIIF

SEQ ID NO: 292 - protein, 7 aa, Staphylococcus aureus
SQFVIIF

SEQ ID NO: 293 - protein, 7 aa, Staphylococcus aureus
SQFVIIF

SEQ ID NO: 294 - protein, 7 aa, Staphylococcus aureus
SQFVIIF

SEQ ID NO: 295 - protein, 7 aa, Staphylococcus aureus
SQFVIIF

SEQ ID NO: 296 - protein, 7 aa, Staphylococcus aureus
SQFVIIF

SEQ ID NO: 297 - protein, 7 aa, Staphylococcus aureus
SQFVIIF

SEQ ID NO: 298 - protein, 7 aa, Staphylococcus aureus
SQFVIIF

SEQ ID NO: 299 - protein, 7 aa, Staphylococcus aureus
SQFVIIF

SEQ ID NO: 300 - protein, 7 aa, Staphylococcus aureus
SQFVIIF

SEQ ID NO: 301 - protein, 7 aa, Staphylococcus aureus
SQFVIIF

SEQ ID NO: 302 - protein, 7 aa, Staphylococcus aureus
SQFVIIF

SEQ ID NO: 303 - protein, 7 aa, Staphylococcus aureus
SQFVIIF

SEQ ID NO: 304 - protein, 7 aa, Staphylococcus aureus
SQFVIIF

SEQ ID NO: 305 - protein, 7 aa, Staphylococcus aureus
SQFVIIF

SEQ ID NO: 306 - protein, 7 aa, Staphylococcus aureus
SQFVIIF

SEQ ID NO: 307 - protein, 7 aa, Staphylococcus aureus
SQFVIIF

SEQ ID NO: 308 - protein, 7 aa, Staphylococcus aureus
SQFVIIF

SEQ ID NO: 309 - protein, 7 aa, Staphylococcus aureus
SQFVIIF

SEQ ID NO: 310 - protein, 7 aa, Staphylococcus warneri
SQFVIIF

SEQ ID NO: 311 - protein, 7 aa, Staphylococcus aureus
SQFVIIF

SEQ ID NO: 312 - protein, 7 aa, Staphylococcus aureus
SQFVIIF

SEQ ID NO: 313 - protein, 7 aa, Staphylococcus aureus
SQFVIIF

SEQ ID NO: 314 - protein, 7 aa, Staphylococcus pseudintermedius
SQFVIIF

SEQ ID NO: 315 - protein, 7 aa, Staphylococcus pseudintermedius
SQFVIIF

SEQ ID NO: 316 - protein, 7 aa, Helicobacter felis
SQFVILF

SEQ ID NO: 317 - protein, 7 aa, Helicobacter mustelae
SQFVILF

SEQ ID NO: 318 - protein, 7 aa, Bacillus cereus
TQFVILF

SEQ ID NO: 319 - protein, 7 aa, Bacillus thuringiensis
TQFVILF

SEQ ID NO: 320 - protein, 7 aa, Bacillus cereus
TQFVILF

SEQ ID NO: 321 - protein, 7 aa, Bacillus thuringiensis
TQFVILF

SEQ ID NO: 322 - protein, 7 aa, Bacillus cereus
TQFVILS

SEQ ID NO: 323 - protein, 7 aa, Bacillus cereus
TQFVILS

SEQ ID NO: 324 - protein, 7 aa, Bacillus cereus
TQFVILF

SEQ ID NO: 325 - protein, 7 aa, Bacillus cereus
TQFVILF

SEQ ID NO: 326 - protein, 7 aa, Bacillus cereus
TQFVILF

SEQ ID NO: 327 - protein, 7 aa, Bacillus cereus
TQFVILF

SEQ ID NO: 328 - protein, 7 aa, Bacillus cereus
TQFVILF

SEQ ID NO: 329 - protein, 7 aa, Bacillus cereus
TQFVILF

SEQ ID NO: 330 - protein, 7 aa, Bacillus thuringiensis
TQFVILF

SEQ ID NO: 331 - protein, 7 aa, Bacillus cereus
TQFVILF

SEQ ID NO: 332 - protein, 7 aa, Bacillus cereus
TQFVILF

SEQ ID NO: 333 - protein, 7 aa, Bacillus cereus
TQYVILF

SEQ ID NO: 334 - protein, 7 aa, Bacillus cereus
TQFVILF

SEQ ID NO: 335 - protein, 7 aa, Bacillus thuringiensis
TQFVILF

SEQ ID NO: 336 - protein, 7 aa, Bacillus thuringiensis
TQFVILF

SEQ ID NO: 337 - protein, 7 aa, Bacillus anthracis
TQFVILF

SEQ ID NO: 338 - protein, 7 aa, Bacillus thuringiensis
TQFVILF

SEQ ID NO: 339 - protein, 7 aa, Bacillus cereus
TQFVILF

SEQ ID NO: 340 - protein, 7 aa, Bacillus thuringiensis
TQFVILF

SEQ ID NO: 341 - protein, 7 aa, Bacillus anthracis
TQFVILF

SEQ ID NO: 342 - protein, 7 aa, Bacillus anthracis
TQFVILF

SEQ ID NO: 343 - protein, 7 aa, Bacillus cereus
TQFVILF

SEQ ID NO: 344 - protein, 7 aa, Bacillus cereus
TQFVILF

SEQ ID NO: 345 - protein, 7 aa, Bacillus cereus
TQYVILF

SEQ ID NO: 346 - protein, 7 aa, Bacillus thuringiensis
TQFVILF

SEQ ID NO: 347 - protein, 7 aa, Bacillus cereus
TQFVILF

SEQ ID NO: 348 - protein, 7 aa, Bacillus thuringiensis
TQFVILF

SEQ ID NO: 349 - protein, 7 aa, Bacillus cereus
TQFVILF

SEQ ID NO: 350 - protein, 7 aa, Bacillus cereus
TQYVILF

SEQ ID NO: 351 - protein, 7 aa, Bacillus thuringiensis
TQFVILF

SEQ ID NO: 352 - protein, 7 aa, Bacillus thuringiensis
TQFVILF

SEQ ID NO: 353 - protein, 7 aa, Bacillus cereus
TQFVILF

SEQ ID NO: 354 - protein, 7 aa, Bacillus cereus
TQFVILF

SEQ ID NO: 355 - protein, 7 aa, Bacillus cereus
TQFVILF

SEQ ID NO: 356 - protein, 7 aa, Bacillus cereus
TQFVILF

SEQ ID NO: 357 - protein, 7 aa, Bacillus cereus
TQFVILF

SEQ ID NO: 358 - protein, 7 aa, Bacillus cereus
TQFVILF

SEQ ID NO: 359 - protein, 7 aa, Bacillus cereus
TQFVILF

SEQ ID NO: 360 - protein, 7 aa, Listeria grayi
NQSVIIL

SEQ ID NO: 361 - protein, 7 aa, Serratia sp.
TQCVIVI

SEQ ID NO: 362 - protein, 7 aa, Serratia odorifera
TQSVIVI

SEQ ID NO: 363 - protein, 7 aa, Pectobacterium carotovorum
TQCVIIL

SEQ ID NO: 364 - protein, 7 aa, Serratia odorifera
TQCVIVI

SEQ ID NO: 365 - protein, 7 aa, Pectobacterium atrosepticum
TQCVIIL

SEQ ID NO: 366 - protein, 7 aa, Serratia proteamaculans
TQCVIVI

SEQ ID NO: 367 - protein, 7 aa, Rahnella sp.
TQCVIVL

SEQ ID NO: 368 - protein, 7 aa, Yersinia rohdei
TQCVIVL

SEQ ID NO: 369 - protein, 7 aa, Pectobacterium carotovorum
TQCVIIL

SEQ ID NO: 370 - protein, 7 aa, Enterobacteriaceae bacterium
SQSVILI

SEQ ID NO: 371 - protein, 7 aa, Yersinia aldovae
TQSVIVI

SEQ ID NO: 372 - protein, 7 aa, Yersinia enterocolitica
TQSVIVI

SEQ ID NO: 373 - protein, 7 aa, Yersinia enterocolitica
TQSVIVI

SEQ ID NO: 374 - protein, 7 aa, Yersinia enterocolitica
TQSVIVI

SEQ ID NO: 375 - protein, 7 aa, Yersinia mollaretii
TQSVIVI

SEQ ID NO: 376 - protein, 7 aa, Yersinia kristensenii
TQCVIIL

SEQ ID NO: 377 - protein, 6 aa, Psychrobacter sp.
TQYVIV

SEQ ID NO: 378 - protein, 6 aa, Psychrobacter arcticus
TQYVII

SEQ ID NO: 379 - protein, 7 aa, Corynebacterium kroppenstedtii
TQFVIII

SEQ ID NO: 380 - protein, 5 aa, Erwinia billingiae
TQAVI

SEQ ID NO: 381 - protein, 6 aa, Psychrobacter sp.
TQYVIV

SEQ ID NO: 382 - protein, 7 aa, Psychrobacter cryohalolentis
TQYVIIL

SEQ ID NO: 383 - protein, 7 aa, Erwinia pyrifoliae
SQAVIVL

SEQ ID NO: 384 - protein, 7 aa, Erwinia amylovora
SQAVIVL

SEQ ID NO: 385 - protein, 7 aa, Erwinia sp.
SQAVIVL

SEQ ID NO: 386 - protein, 7 aa, Erwinia amylovora
SQAVIVL

SEQ ID NO: 387 - protein, 7 aa, Corynebacterium striatum
NQFVIVL

SEQ ID NO: 388 - protein, 6 aa, Mycobacterium intracellulare
MQFVIL

SEQ ID NO: 389 - protein, 7 aa, Mycobacterium tuberculosis
MQFVILM

SEQ ID NO: 390 - protein, 7 aa, Mycobacterium tuberculosis
MQFVILM

SEQ ID NO: 391 - protein, 6 aa, Mycobacterium avium
MQFVIL

SEQ ID NO: 392 - protein, 6 aa, Mycobacterium avium
MQFVIL

SEQ ID NO: 393 - protein, 6 aa, Mycobacterium avium
MQFVIL

SEQ ID NO: 394 - protein, 6 aa, Mycobacterium avium
MQFVIL

SEQ ID NO: 395 - protein, 6 aa, Mycobacterium parascrofulaceum
MQFVIL

SEQ ID NO: 396 - protein, 6 aa, Mycobacterium marinum
MQFVIL

SEQ ID NO: 397 - protein, 6 aa, Mycobacterium ulcerans
MQFVIL

SEQ ID NO: 398 - protein, 7 aa, Pantoea ananatis
TQAVIVL

SEQ ID NO: 399 - protein, 7 aa, Pantoea ananatis
TQAVIVL

SEQ ID NO: 400 - protein, 7 aa, Pantoea agglomerans
TQAVIVL

SEQ ID NO: 401 - protein, 7 aa, Pantoea vagans
TQAVIVL

SEQ ID NO: 402 - protein, 7 aa, Enterobacter cloacae
TQAVIIL

SEQ ID NO: 403 - protein, 7 aa, Pantoea sp.
TQAVIVL

SEQ ID NO: 404 - protein, 7 aa, Enterobacter cloacae
TQAVIIL

SEQ ID NO: 405 - protein, 7 aa, Citrobacter youngae
TQAVIVL

SEQ ID NO: 406 - protein, 7 aa, Enterobacter cancerogenus
TQAVILL

SEQ ID NO: 407 - protein, 7 aa, Enterobacter cloacae
TQAVILL

SEQ ID NO: 408 - protein, 7 aa, Enterobacter hormaechei
TQAVILL

SEQ ID NO: 409 - protein, 7 aa, Citrobacter koseri
TQAVIVL

SEQ ID NO: 410 - protein, 7 aa, Enterobacter cloacae
TQAVILL

SEQ ID NO: 411 - protein, 7 aa, Enterobacter cloacae
TQAVILL

SEQ ID NO: 412 - protein, 7 aa, Enterobacter aerogenes
TQAVIVL

SEQ ID NO: 413 - protein, 7 aa, Salmonella enterica
TQAVIVL

SEQ ID NO: 414 - protein, 7 aa, Salmonella enterica
TQAVIVL

SEQ ID NO: 415 - protein, 7 aa, Salmonella enterica
TQAVIVL

SEQ ID NO: 416 - protein, 7 aa, Salmonella enterica
TQAVIVL

SEQ ID NO: 417 - protein, 7 aa, Salmonella enterica
TQAVIVL

SEQ ID NO: 418 - protein, 7 aa, Salmonella enterica
TQAVIVL

SEQ ID NO: 419 - protein, 7 aa, Salmonella enterica
TQAVIVL

SEQ ID NO: 420 - protein, 7 aa, Salmonella enterica
TQAVIVL

SEQ ID NO: 421 - protein, 7 aa, Salmonella enterica
TQAVIVL

SEQ ID NO: 422 - protein, 7 aa, Salmonella enterica
TQAVIVL

SEQ ID NO: 423 - protein, 7 aa, Salmonella enterica
TQAVIVL

SEQ ID NO: 424 - protein, 7 aa, Salmonella enterica
TQAVIVL

SEQ ID NO: 425 - protein, 7 aa, Salmonella enterica
TQAVIVL

SEQ ID NO: 426 - protein, 7 aa, Salmonella enterica
TQAVIVL

SEQ ID NO: 427 - protein, 7 aa, Enterobacter sp.
TQAVIIL

SEQ ID NO: 428 - protein, 7 aa, Pantoea sp.
TQAVIVL

SEQ ID NO: 429 - protein, 7 aa, Salmonella enterica
TQAVIVL

SEQ ID NO: 430 - protein, 7 aa, Citrobacter rodentium
TQAVIVL

SEQ ID NO: 431 - protein, 7 aa, Salmonella enterica
TQAVIVL

SEQ ID NO: 432 - protein, 7 aa, Salmonella enterica
TQAVIVL

SEQ ID NO: 433 - protein, 7 aa, Klebsiella variicola
TQAVIVL

SEQ ID NO: 434 - protein, 7 aa, Salmonella enterica
TQAVIVL

SEQ ID NO: 435 - protein, 7 aa, Citrobacter sp.
TQAVIVL

SEQ ID NO: 436 - protein, 7 aa, Klebsiella sp.
TQAVIVL

SEQ ID NO: 437 - protein, 7 aa, Klebsiella pneumoniae
TQAVIVL

SEQ ID NO: 438 - protein, 7 aa, Salmonella enterica
TQAVIVL

SEQ ID NO: 439 - protein, 7 aa, Klebsiella pneumoniae
TQAVIVL

SEQ ID NO: 440 - protein, 7 aa, Klebsiella pneumoniae
TQAVIVL

SEQ ID NO: 441 - protein, 7 aa, Klebsiella sp.
TQAVIVL

SEQ ID NO: 442 - protein, 7 aa, Klebsiella pneumoniae
TQAVIVL

SEQ ID NO: 443 - protein, 7 aa, Cronobacter sakazakii
TQAVIVL

SEQ ID NO: 444 - protein, 7 aa, Cronobacter sakazakii
TQAVIVL

SEQ ID NO: 445 - protein, 7 aa, Erwinia tasmaniensis
TQAVIVL

SEQ ID NO: 446 - protein, 7 aa, Cronobacter turicensis
TQAVIVL

SEQ ID NO: 447 - protein, 7 aa, Clostridium acetobutylicum
SQFIILF

SEQ ID NO: 448 - protein, 6 aa, Melissococcus plutonius
LQFIIM

SEQ ID NO: 449 - protein, 6 aa, Mycobacterium kansasii
MQFIIL

SEQ ID NO: 450 - protein, 7 aa, Mycobacterium leprae
MQFIILA

SEQ ID NO: 451 - protein, 7 aa, Burkholderia xenovorans
TAHIIFF

SEQ ID NO: 452 - protein, 7 aa, Corynebacterium striatum
VANIIFT

SEQ ID NO: 453 - protein, 7 aa, Corynebacterium aurimucosum
VANIIFT

SEQ ID NO: 454 - protein, 7 aa, Ralstonia eutropha
SAHIIFL

SEQ ID NO: 455 - protein, 7 aa, Corynebacterium ammoniagenes
VAHIIFT

SEQ ID NO: 456 - protein, 5 aa, Serratia odorifera
SNGII

SEQ ID NO: 457 - protein, 5 aa, Serratia sp.
SNGII

SEQ ID NO: 458 - protein, 5 aa, Serratia proteamaculans
SNGII

SEQ ID NO: 459 - protein, 5 aa, Serratia odorifera
SNGII

SEQ ID NO: 460 - protein, 6 aa, Methanosarcina barkeri
VSFILI

SEQ ID NO: 461 - protein, 6 aa, Methanosarcina acetivorans
VSFILV

SEQ ID NO: 462 - protein, 7 aa, Trichophyton rubrum
FTSVITA

SEQ ID NO: 463 - protein, 7 aa, Trichophyton tonsurans
FTSVITA

SEQ ID NO: 464 - protein, 6 aa, Edwardsiella ictaluri
LTSVLL

SEQ ID NO: 465 - protein, 6 aa, Edwardsiella tarda
FTSVLM

SEQ ID NO: 466 - protein, 7 aa, Nectria haematococca
SSQIIQI

SEQ ID NO: 467 - protein, 5 aa, Malassezia globosa
MMCVI

SEQ ID NO: 468 - protein, 6 aa, Providencia stuartii
MTLFIL

SEQ ID NO: 469 - protein, 5 aa, Nectria haematococca
SSQII

SEQ ID NO: 470 - protein, 5 aa, Synechococcus sp.
LTLVL

SEQ ID NO: 471 - protein, 5 aa, Francisella philomiragia
FTSVL

SEQ ID NO: 472 - protein, 5 aa, Leptosphaeria maculans
TTNVI

SEQ ID NO: 473 - protein, 5 aa, Synechococcus sp.
LTMVL

SEQ ID NO: 474 - protein, 5 aa, Francisella philomiragia
FTSVL

SEQ ID NO: 475 - protein, 5 aa, Pyrenophora tritici-repentis
TTNVI

SEQ ID NO: 476 - protein, 5 aa, Pyrenophora teres
TTNVI

SEQ ID NO: 477 - protein, 5 aa, Penicillium marneffei
LTSVI

SEQ ID NO: 478 - protein, 6 aa, Lachancea kluyveri
VMMVIL

SEQ ID NO: 479 - protein, 6 aa, Meyerozyma guilliermondii
TTMVII

SEQ ID NO: 480 - protein, 6 aa, Meyerozyma guilliermondii
TTMVII

SEQ ID NO: 481 - protein, 5 aa, Shewanella piezotolerans
FTFAI

SEQ ID NO: 482 - protein, 6 aa, Hahella chejuensis
DSLIFL

SEQ ID NO: 483 - protein, 6 aa, Clavispora lusitaniae
YTLVIM

SEQ ID NO: 484 - protein, 5 aa, Rheinheimera sp.
DELIF

SEQ ID NO: 485 - protein, 6 aa, Nostoc punctiforme
FTLIIM

SEQ ID NO: 486 - protein, 7 aa, Acinetobacter calcoaceticus
VVNIIFI

SEQ ID NO: 487 - protein, 7 aa, Acinetobacter sp.
VVNIIFI

SEQ ID NO: 488 - protein, 7 aa, Acinetobacter sp.
VVNIIFI

SEQ ID NO: 489 - protein, 7 aa, Acinetobacter baumannii
VVNIIFI

SEQ ID NO: 490 - protein, 7 aa, Acinetobacter sp.
VVNIIFI

SEQ ID NO: 491 - protein, 7 aa, Acinetobacter baumannii
VVNIIFI

SEQ ID NO: 492 - protein, 7 aa, Acinetobacter baumannii
VVNIIFI

SEQ ID NO: 493 - protein, 7 aa, Acinetobacter baumannii
VVNIIFI

SEQ ID NO: 494 - protein, 7 aa, Acinetobacter baumannii
VVNIIFI

SEQ ID NO: 495 - protein, 7 aa, Acinetobacter calcoaceticus
VVNIIFI

SEQ ID NO: 496 - protein, 7 aa, Providencia alcalifaciens
FTSILLV

SEQ ID NO: 497 - protein, 5 aa, Rhizopus oryzae
FTEII

SEQ ID NO: 498 - protein, 7 aa, Methylobacter tundripaludum
FTLIIAM

SEQ ID NO: 499 - protein, 6 aa, Providencia stuartii
FTSILL

SEQ ID NO: 500 - protein, 7 aa, Providencia rettgeri
FTSILLV

SEQ ID NO: 501 - protein, 5 aa, Acinetobacter baumannii
VVNII

SEQ ID NO: 502 - protein, 7 aa, Terriglobus saanensis
VTGIIFA

SEQ ID NO: 503 - protein, 6 aa, Desulfovibrio magneticus
FTSILL

SEQ ID NO: 504 - protein, 7 aa, Acinetobacter radioresistens
IVNIIFV

SEQ ID NO: 505 - protein, 7 aa, Acinetobacter radioresistens
IVNIIFV

SEQ ID NO: 506 - protein, 7 aa, Edwardsiella tarda
FTSILMM

SEQ ID NO: 507 - protein, 7 aa, Dickeya dadantii
FTSILLV

SEQ ID NO: 508 - protein, 7 aa, Cryptosporidium hominis
FTLIIMM

SEQ ID NO: 509 - protein, 7 aa, Cryptosporidium parvum
FTLIIMM

SEQ ID NO: 510 - protein, 6 aa, Proteus mirabilis
FTSILL

SEQ ID NO: 511 - protein, 7 aa, Providencia rustigianii
FTSILVV

SEQ ID NO: 512 - protein, 6 aa, Proteus mirabilis
FTSILL

SEQ ID NO: 513 - protein, 7 aa, Schizophyllum commune
FTSILQS

SEQ ID NO: 514 - protein, 7 aa, Desulfovibrio salexigens
ITSILML

SEQ ID NO: 515 - protein, 6 aa, Desulfovibrio sp.
FTSILL

SEQ ID NO: 516 - protein, 5 aa, Rhizopus oryzae
FTEII

SEQ ID NO: 517 - protein, 6 aa, Desulfovibrio fructosovorans
FTSILL

SEQ ID NO: 518 - protein, 7 aa, Arthroderma gypseum
FTSIITA

SEQ ID NO: 519 - protein, 7 aa, Providencia rettgeri
FTSICMI

SEQ ID NO: 520 - protein, 7 aa, Providencia rustigianii
VTSICMI

SEQ ID NO: 521 - protein, 7 aa, Arthroderma otae
FTSIITS

SEQ ID NO: 522 - protein, 5 aa, Paracoccidioides brasiliensis
FTNII

SEQ ID NO: 523 - protein, 7 aa, Aspergillus niger
FTNIITA

SEQ ID NO: 524 - protein, 5 aa, Phaeosphaeria nodorum
FTNII

SEQ ID NO: 525 - protein, 5 aa, Paracoccidioides brasiliensis
FTNII

SEQ ID NO: 526 - protein, 7 aa, Cryptosporidium muris
FTLIILM

SEQ ID NO: 527 - protein, 5 aa, Paracoccidioides brasiliensis
FTNII

SEQ ID NO: 528 - protein, 7 aa, Monascus purpureus
FTNIITA

SEQ ID NO: 529 - protein, 7 aa, Leptosphaeria maculans
FTNIIIA

SEQ ID NO: 530 - protein, 7 aa, Coccidioides posadasii
FTNIITS

SEQ ID NO: 531 - protein, 7 aa, Pyrenophora teres
FTNIIVA

SEQ ID NO: 532 - protein, 7 aa, Glomerella graminicola
FTNIITS

SEQ ID NO: 533 - protein, 7 aa, Coccidioides immitis
FTNIITS

SEQ ID NO: 534 - protein, 7 aa, Ktedonobacter racemifer
FTSILRY

SEQ ID NO: 535 - protein, 7 aa, Sordaria macrospora
FTNIITS

SEQ ID NO: 536 - protein, 6 aa, Pyrenophora tritici-repentis
FTNIIV

SEQ ID NO: 537 - protein, 7 aa, Coccidioides posadasii
FTNIITS

SEQ ID NO: 538 - protein, 7 aa, Penicillium chrysogenum
FTNIITA

SEQ ID NO: 539 - protein, 7 aa, Schizophyllum commune
YTSILQS

SEQ ID NO: 540 - protein, 7 aa, Desulfotalea psychrophila
FTSILLI

SEQ ID NO: 541 - protein, 7 aa, Talaromyces stipitatus
FTNIITS

SEQ ID NO: 542 - protein, 5 aa, Desulfovibrio aespoeensis
ITSIL

SEQ ID NO: 543 - protein, 7 aa, Aspergillus fumigatus
FTNIITA

SEQ ID NO: 544 - protein, 7 aa, Podospora anserina
FTNIITS

SEQ ID NO: 545 - protein, 5 aa, Aspergillus niger
FTNII

SEQ ID NO: 546 - protein, 7 aa, Neosartorya fischeri
FTNIITA

SEQ ID NO: 547 - protein, 7 aa, Sclerotinia sclerotiorum
FTNIITS

SEQ ID NO: 548 - protein, 7 aa, Grosmannia clavigera
FTNIITS

SEQ ID NO: 549 - protein, 7 aa, Penicillium marneffei
FTNIITA

SEQ ID NO: 550 - protein, 7 aa, Aspergillus oryzae
FTNIITA

SEQ ID NO: 551 - protein, 5 aa, Ajellomyces dermatitidis
FTNII

SEQ ID NO: 552 - protein, 5 aa, Ajellomyces dermatitidis
FTNII

SEQ ID NO: 553 - protein, 5 aa, Yersinia aldovae
FTSIL

SEQ ID NO: 554 - protein, 7 aa, Botryotinia fuckeliana
FTNIITS

SEQ ID NO: 555 - protein, 5 aa, Francisella novicida
FTSIL

SEQ ID NO: 556 - protein, 5 aa, Francisella tularensis
FTSIL

SEQ ID NO: 557 - protein, 5 aa, Francisella tularensis
FTSIL

SEQ ID NO: 558 - protein, 5 aa, Francisella tularensis
FTSIL

SEQ ID NO: 559 - protein, 5 aa, Francisella novicida
FTSIL

SEQ ID NO: 560 - protein, 5 aa, Vibrio angustum
FTSIL

SEQ ID NO: 561 - protein, 5 aa, Francisella tularensis
FTSIL

SEQ ID NO: 562 - protein, 5 aa, Francisella tularensis
FTSIL

SEQ ID NO: 563 - protein, 7 aa, Aspergillus nidulans
FTNIITA

SEQ ID NO: 564 - protein, 7 aa, Aspergillus terreus
FTNIITA

SEQ ID NO: 565 - protein, 6 aa, Providencia alcalifaciens
VTSICM

SEQ ID NO: 566 - protein, 7 aa, Nectria haematococca
FTNIITS

SEQ ID NO: 567 - protein, 7 aa, Metarhizium acridum
FTNIITS

SEQ ID NO: 568 - protein, 7 aa, Metarhizium anisopliae
FTNIITS

SEQ ID NO: 569 - protein, 7 aa, Aspergillus nidulans
FTNIITA

SEQ ID NO: 570 - protein, 6 aa, Starkeya novella
FTSILS

SEQ ID NO: 571 - protein, 7 aa, Chaetomium globosum
FTNIITA

SEQ ID NO: 572 - protein, 7 aa, Chaetomium globosum
FTNIITA

SEQ ID NO: 573 - protein, 7 aa, Frankia sp.
FTSILMY

SEQ ID NO: 574 - protein, 7 aa, Aspergillus clavatus
FTNIITA

SEQ ID NO: 575 - protein, 7 aa, Fusarium oxysporum
FTNIITS

SEQ ID NO: 576 - protein, 6 aa, Beijerinckia indica
LTSILL

SEQ ID NO: 577 - protein, 7 aa, Gibberella zeae
FTNIITS

SEQ ID NO: 578 - protein, 5 aa, Francisella sp.
FTSIL

SEQ ID NO: 579 - protein, 7 aa, Verticillium albo-atrum
FTNIITS

SEQ ID NO: 580 - protein, 5 aa, Emericella nidulans
FTNII

SEQ ID NO: 581 - protein, 5 aa, Phaeosphaeria nodorum
TTNII

SEQ ID NO: 582 - protein, 5 aa, Synechococcus sp.
LTLII

SEQ ID NO: 583 - protein, 5 aa, Aspergillus oryzae
FTNII

SEQ ID NO: 584 - protein, 6 aa, Podospora anserina
FTQIFV

SEQ ID NO: 585 - protein, 5 aa, Synechococcus sp.
LTMII

SEQ ID NO: 586 - protein, 6 aa, Aspergillus clavatus
FTWIFF

SEQ ID NO: 587 - protein, 5 aa, Dekkera bruxellensis
ITFII

SEQ ID NO: 588 - protein, 7 aa, Candida albicans
MTVIIMS

SEQ ID NO: 589 - protein, 7 aa, Candida albicans
MTVIIMS

SEQ ID NO: 590 - protein, 6 aa, Candida dubliniensis
MTVIIM

SEQ ID NO: 591 - protein, 6 aa, Candida tropicalis
MTVIIM

SEQ ID NO: 592 - protein, 6 aa, Chlorella variabilis
YTIIIL

SEQ ID NO: 593 - protein, 7 aa, Coprinopsis cinerea
FTNIIQS

SEQ ID NO: 594 - protein, 7 aa, Meyerozyma guilliermondii
FTSIIQL

SEQ ID NO: 595 - protein, 7 aa, Meyerozyma guilliermondii
FTSIIQS

SEQ ID NO: 596 - protein, 7 aa, Yarrowia lipolytica
FTSIIQS

SEQ ID NO: 597 - protein, 5 aa, Saccharomyces cerevisiae
FTAII

SEQ ID NO: 598 - protein, 7 aa, Laccaria bicolor
FTNIIQS

SEQ ID NO: 599 - protein, 5 aa, Saccharomyces cerevisiae
FTAII

SEQ ID NO: 600 - protein, 7 aa, Tuber melanosporum
FTNIIIT

SEQ ID NO: 601 - protein, 7 aa, Pichia angusta
FTSIIQS

SEQ ID NO: 602 - protein, 7 aa, Candida albicans
FSAIIQA

SEQ ID NO: 603 - protein, 7 aa, Candida dubliniensis
FSAIIQA

SEQ ID NO: 604 - protein, 7 aa, Lodderomyces elongisporus
FTNIIQS

SEQ ID NO: 605 - protein, 5 aa, Wickerhamomyces anomalus
FTAII

SEQ ID NO: 606 - protein, 5 aa, Neurospora crassa
YTWII

SEQ ID NO: 607 - protein, 5 aa, Schizosaccharomyces pombe
YTWII

SEQ ID NO: 608 - protein, 6 aa, Aspergillus niger
YTWIIF

SEQ ID NO: 609 - protein, 6 aa, Aspergillus niger
YTWIIF

SEQ ID NO: 610 - protein, 5 aa, Sorghum bicolor
YTWII

SEQ ID NO: 611 - protein, 7 aa, Schizosaccharomyces pombe
FTNIIQT

SEQ ID NO: 612 - protein, 7 aa, Schizosaccharomyces japonicus
FTNIIQT

SEQ ID NO: 613 - protein, 7 aa, Saccharomyces cerevisiae
FTAIIQT

SEQ ID NO: 614 - protein, 7 aa, Candida glabrata
FTGIIQT

SEQ ID NO: 615 - protein, 7 aa, Ustilago maydis
FTSIIQT

SEQ ID NO: 616 - protein, 7 aa, Melampsora larici-populina
FTSIIQT

SEQ ID NO: 617 - protein, 7 aa, Clavispora lusitaniae
FTAIIQS

SEQ ID NO: 618 - protein, 7 aa, Saccharomyces cerevisiae
FTAIIQT

SEQ ID NO: 619 - protein, 7 aa, Saccharomyces cerevisiae
FTAIIQT

SEQ ID NO: 620 - protein, 7 aa, Saccharomyces cerevisiae
FTAIIQT

SEQ ID NO: 621 - protein, 7 aa, Schizosaccharomyces japonicus
FTNIIQT

SEQ ID NO: 622 - protein, 7 aa, Saccharomyces cerevisiae
FTAIIQT

SEQ ID NO: 623 - protein, 7 aa, Schizosaccharomyces japonicus
FTNIIQT

SEQ ID NO: 624 - protein, 7 aa, Zygosaccharomyces rouxii
FTAIIQT

SEQ ID NO: 625 - protein, 7 aa, Saccharomyces pastorianus
FTAIIQT

SEQ ID NO: 626 - protein, 7 aa, Zygosaccharomyces bisporus
FTAIIQT

SEQ ID NO: 627 - protein, 7 aa, Lachancea thermotolerans
FTAIIQT

SEQ ID NO: 628 - protein, 7 aa, Candida boidinii
FTAIIQS

SEQ ID NO: 629 - protein, 7 aa, Saccharomyces cerevisiae
FTAIIQT

SEQ ID NO: 630 - protein, 7 aa, Saccharomyces cerevisiae
FTAIIQT

SEQ ID NO: 631 - protein, 7 aa, Saccharomyces cerevisiae
FTAIIQT

SEQ ID NO: 632 - protein, 7 aa, Ashbya gossypii
FTAIIQT

SEQ ID NO: 633 - protein, 7 aa, Saccharomyces cerevisiae
FTAIIQT

SEQ ID NO: 634 - protein, 6 aa, Saccharomyces cerevisiae
FTAIIQ

SEQ ID NO: 635 - protein, 6 aa, Saccharomyces cerevisiae
FTAIIQ

SEQ ID NO: 636 - protein, 6 aa, Scheffersomyces stipitis
FTAIIQ

SEQ ID NO: 637 - protein, 6 aa, Scheffersomyces stipitis
FTAIIQ

SEQ ID NO: 638 - protein, 7 aa, Candida glabrata
FTAIIQT

SEQ ID NO: 639 - protein, 7 aa, Pichia pastoris
FTAIIQT

SEQ ID NO: 640 - protein, 7 aa, Saccharomyces cerevisiae
FTAIIQT

SEQ ID NO: 641 - protein, 7 aa, Candida glabrata
FTAIIQT

SEQ ID NO: 642 - protein, 7 aa, Pichia jadinii
FTAIIQT

SEQ ID NO: 643 - protein, 7 aa, Lachancea kluyveri
FTAIIQT

SEQ ID NO: 644 - protein, 6 aa, Lodderomyces elongisporus
FTAIIQ

SEQ ID NO: 645 - protein, 7 aa, Saccharomyces cerevisiae
FTAIIQT

SEQ ID NO: 646 - protein, 7 aa, Kluyveromyces marxianus
FTAIIQT

SEQ ID NO: 647 - protein, 7 aa, Lachancea thermotolerans
FTAIIQT

SEQ ID NO: 648 - protein, 7 aa, Saccharomyces cerevisiae
FTAIIQT

SEQ ID NO: 649 - protein, 7 aa, Saccharomyces cerevisiae
FTAIIQT

SEQ ID NO: 650 - protein, 7 aa, Kluyveromyces lactis
FTAIIQT

SEQ ID NO: 651 - protein, 7 aa, Vanderwaltozyma polyspora
FTAIIQT

SEQ ID NO: 652 - protein, 7 aa, Ashbya gossypii
FTAIIQT

SEQ ID NO: 653 - protein, 7 aa, Candida tropicalis
FTAIIQS

SEQ ID NO: 654 - protein, 7 aa, Kluyveromyces lactis
FTAIIQT

SEQ ID NO: 655 - protein, 7 aa, Debaryomyces hansenii
FTSIIQT

SEQ ID NO: 656 - protein, 7 aa, Lachancea kluyveri
FTAIIQT

SEQ ID NO: 657 - protein, 7 aa, Candida albicans
FTAIIQS

SEQ ID NO: 658 - protein, 7 aa, Meyerozyma guilliermondii
FTAIIQS

SEQ ID NO: 659 - protein, 7 aa, Meyerozyma guilliermondii
FTAIIQS

SEQ ID NO: 660 - protein, 7 aa, Candida dubliniensis
FTAIIQS

SEQ ID NO: 661 - protein, 7 aa, Hanseniaspora uvarum
FTAIIQT

SEQ ID NO: 662 - protein, 7 aa, Schizosaccharomyces pombe
FTNIIQT

SEQ ID NO: 663 - protein, 7 aa, Lachancea kluyveri
FTAIIQT

SEQ ID NO: 664 - protein, 7 aa, Lachancea kluyveri
FTAIIQT

SEQ ID NO: 665 - protein, 7 aa, Scheffersomyces stipitis
FTSIIQT

SEQ ID NO: 666 - protein, 7 aa, Scheffersomyces stipitis
FTSIIQT

SEQ ID NO: 667 - protein, 7 aa, Saccharomyces cerevisiae
FTAIIQT

SEQ ID NO: 668 - protein, 7 aa, Saccharomyces cerevisiae
FTAIIQT

SEQ ID NO: 669 - protein, 7 aa, Debaryomyces hansenii
FTAIIQS

SEQ ID NO: 670 - protein, 7 aa, Cryptococcus neoformans
FTSIIQT

SEQ ID NO: 671 - protein, 7 aa, Cryptococcus neoformans
FTSIIQT

SEQ ID NO: 672 - protein, 7 aa, Cryptococcus gattii
FTSIIQT

SEQ ID NO: 673 - protein, 7 aa, Planctomyces maris
YTWIIWV

SEQ ID NO: 674 - protein, 7 aa, Selaginella moellendorffii
YTWIIWV

SEQ ID NO: 675 - protein, 7 aa, Gluconobacter oxydans
YTWIIWV

SEQ ID NO: 676 - protein, 7 aa, Selaginella moellendorffii
YTWIIWV

SEQ ID NO: 677 - protein, 7 aa, Ricinus communis
YTWIIWV

SEQ ID NO: 678 - protein, 7 aa, Arabidopsis lyrata
YTWIIWV

SEQ ID NO: 679 - protein, 7 aa, Arabidopsis lyrata
YTWIIWV

SEQ ID NO: 680 - protein, 7 aa, Acetobacter pasteurianus
YTWIIWV

SEQ ID NO: 681 - protein, 7 aa, Arabidopsis thaliana
YTWIIWV

SEQ ID NO: 682 - protein, 7 aa, Acetobacter pomorum
YTWIIWV

SEQ ID NO: 683 - protein, 7 aa, Acetobacter pasteurianus
YTWIIWV

SEQ ID NO: 684 - protein, 7 aa, Arabidopsis thaliana
YTWTIWV

SEQ ID NO: 685 - protein, 7 aa, Arabidopsis thaliana
YTWIIWV

SEQ ID NO: 686 - protein, 7 aa, Acetobacter pasteurianus
YTWIIWV

SEQ ID NO: 687 - protein, 7 aa, Populus trichocarpa
YTWIIWV

SEQ ID NO: 688 - protein, 7 aa, Gluconacetobacter sp.
YTWIIWV

SEQ ID NO: 689 - protein, 7 aa, Arabidopsis lyrata
YTWIIWI

SEQ ID NO: 690 - protein, 7 aa, Ktedonobacter racemifer
YTWIIWV

SEQ ID NO: 691 - protein, 7 aa, Physcomitrella patens
YTWIIWV

SEQ ID NO: 692 - protein, 7 aa, Zymobacter palmae
YTWIIWV

SEQ ID NO: 693 - protein, 7 aa, Legionella pneumophila
YTWIIWV

SEQ ID NO: 694 - protein, 7 aa, Legionella pneumophila
YTWIIWV

SEQ ID NO: 695 - protein, 7 aa, Legionella pneumophila
YTWIIWV

SEQ ID NO: 696 - protein, 7 aa, Citrus sinensis
YTWIIWV

SEQ ID NO: 697 - protein, 7 aa, Lotus japonicus
YTWIIWV

SEQ ID NO: 698 - protein, 7 aa, Populus trichocarpa
YTWIIWV

SEQ ID NO: 699 - protein, 7 aa, Oryza sativa
YTWIIWV

SEQ ID NO: 700 - protein, 7 aa, Vitis vinifera
YTWIIWV

SEQ ID NO: 701 - protein, 7 aa, Arabidopsis thaliana
YTWIIWV

SEQ ID NO: 702 - protein, 7 aa, Oryza sativa
YTWIIWV

SEQ ID NO: 703 - protein, 7 aa, Lachancea thermotolerans
YTWIIWV

SEQ ID NO: 704 - protein, 7 aa, Beijerinckia indica
YTWIIWV

SEQ ID NO: 705 - protein, 7 aa, Neurospora crassa
YTWIIWV

SEQ ID NO: 706 - protein, 7 aa, Physcomitrella patens
YTWIIWV

SEQ ID NO: 707 - protein, 7 aa, Oryza sativa
YTWIIWV

SEQ ID NO: 708 - protein, 7 aa, Hordeum vulgare
YTWIIWV

SEQ ID NO: 709 - protein, 7 aa, Oryza sativa
YTWIIWV

SEQ ID NO: 710 - protein, 7 aa, Oryza sativa
YTWIIWV

SEQ ID NO: 711 - protein, 7 aa, Fragaria sp.
YTWIIWV

SEQ ID NO: 712 - protein, 7 aa, Sorghum bicolor
YTWIIWV

SEQ ID NO: 713 - protein, 7 aa, Arabidopsis thaliana
YTWIIWV

SEQ ID NO: 714 - protein, 7 aa, Oryza sativa
YTWIIWV

SEQ ID NO: 715 - protein, 7 aa, Arabidopsis thaliana
YTWIIWV

SEQ ID NO: 716 - protein, 6 aa, Arabidopsis thaliana
YTWIIW

SEQ ID NO: 717 - protein, 7 aa, Petunia sp.
YTWIIWV

SEQ ID NO: 718 - protein, 7 aa, Prunus armeniaca
YTWIIWV

SEQ ID NO: 719 - protein, 6 aa, Gluconacetobacter diazotrophicus
YTWIIW

SEQ ID NO: 720 - protein, 7 aa, Physcomitrella patens
YTWIIWV

SEQ ID NO: 721 - protein, 7 aa, Aspergillus fumigatus
YTWIIWV

SEQ ID NO: 722 - protein, 7 aa, Granulicella tundricola
YTWIIWV

SEQ ID NO: 723 - protein, 7 aa, Oryza sativa
YTWIIWV

SEQ ID NO: 724 - protein, 7 aa, Fragaria sp.
YTWIIWV

SEQ ID NO: 725 - protein, 7 aa, Prunus dulcis
YTWIIWV

SEQ ID NO: 726 - protein, 7 aa, Hordeum vulgare
YTWIIWV

SEQ ID NO: 727 - protein, 7 aa, Schizosaccharomyces pombe
YTWIIWV

SEQ ID NO: 728 - protein, 7 aa, Pisum sativum
YTWIIWV

SEQ ID NO: 729 - protein, 7 aa, Arabidopsis lyrata
YTWIIWV

SEQ ID NO: 730 - protein, 6 aa, Schizosaccharomyces pombe
YTWIIW

SEQ ID NO: 731 - protein, 6 aa, Gluconacetobacter diazotrophicus
YTWIIW

SEQ ID NO: 732 - protein, 7 aa, Lotus corniculatus
YTWIIWV

SEQ ID NO: 733 - protein, 7 aa, Oryza sativa
YTWIIWV

SEQ ID NO: 734 - protein, 7 aa, Vitis vinifera
YTWIIWV

SEQ ID NO: 735 - protein, 7 aa, Populus trichocarpa
YTWIIWV

SEQ ID NO: 736 - protein, 7 aa, Vitis vinifera
YTWIIWV

SEQ ID NO: 737 - protein, 7 aa, Solanum tuberosum
YTWIIWV

SEQ ID NO: 738 - protein, 7 aa, Populus trichocarpa
YTWIIWV

SEQ ID NO: 739 - protein, 7 aa, Oryza sativa
YTWIIWV

SEQ ID NO: 740 - protein, 7 aa, Dianthus caryophyllus
YTWIIWV

SEQ ID NO: 741 - protein, 7 aa, Zea mays
YTWIIWV

SEQ ID NO: 742 - protein, 7 aa, Zea mays
YTWIIWV

SEQ ID NO: 743 - protein, 7 aa, Vitis vinifera
YTWIIWV

SEQ ID NO: 744 - protein, 7 aa, Zea mays
YTWIIWV

SEQ ID NO: 745 - protein, 7 aa, Podospora anserina
YTWIIWV

SEQ ID NO: 746 - protein, 7 aa, Salvia miltiorrhiza
YTWIIWV

SEQ ID NO: 747 - protein, 7 aa, Zea mays
YTWIIWV

SEQ ID NO: 748 - protein, 7 aa, Hordeum vulgare
YTWIIWV

SEQ ID NO: 749 - protein, 7 aa, Selaginella moellendorffii
YTWIIWV

SEQ ID NO: 750 - protein, 7 aa, Sorghum bicolor
YTWIIWV

SEQ ID NO: 751 - protein, 7 aa, Selaginella moellendorffii
YTWIIWV

SEQ ID NO: 752 - protein, 7 aa, Oryza sativa
YTWIIWV

SEQ ID NO: 753 - protein, 7 aa, Ricinus communis
YTWIIWV

SEQ ID NO: 754 - protein, 7 aa, Oryza sativa
YTWIIWV

SEQ ID NO: 755 - protein, 7 aa, Gluconacetobacter hansenii
YTWIIWV

SEQ ID NO: 756 - protein, 7 aa, Sorghum bicolor
YTWIIWV

SEQ ID NO: 757 - protein, 7 aa, Physcomitrella patens
YTWIIWV

SEQ ID NO: 758 - protein, 7 aa, Lycoris aurea
YTWIIWV

SEQ ID NO: 759 - protein, 7 aa, Zea mays
YTWIIWV

SEQ ID NO: 760 - protein, 7 aa, Lycoris aurea
YTWIIWV

SEQ ID NO: 761 - protein, 7 aa, Oryza sativa
YTWIIWV

SEQ ID NO: 762 - protein, 7 aa, Zymomonas mobilis
YTWIIWV

SEQ ID NO: 763 - protein, 7 aa, Zymomonas mobilis
YTWIIWV

SEQ ID NO: 764 - protein, 7 aa, Nicotiana tabacum
YTWIIWV

SEQ ID NO: 765 - protein, 7 aa, Zymomonas mobilis
YTWIIWV

SEQ ID NO: 766 - protein, 7 aa, Zymomonas mobilis
YTWIIWV

SEQ ID NO: 767 - protein, 7 aa, Zea mays
YTWIIWV

SEQ ID NO: 768 - protein, 7 aa, Zymomonas mobilis
YTWIIWV

SEQ ID NO: 769 - protein, 7 aa, Zymomonas mobilis
YTWIIWV

SEQ ID NO: 770 - protein, 7 aa, Zymomonas Mobilis
YTWIIWV

SEQ ID NO: 771 - protein, 7 aa, Zea mays
YTWIIWV

SEQ ID NO: 772 - protein, 7 aa, Zymomonas mobilis
YTWIIWV

SEQ ID NO: 773 - protein, 7 aa, Zea mays
YTWIIWV

SEQ ID NO: 774 - protein, 7 aa, Zea mays
YTWIIWV

SEQ ID NO: 775 - protein, 7 aa, Gibberella zeae
YTWIIWV

SEQ ID NO: 776 - protein, 7 aa, Oryza sativa
YTWIIWV

SEQ ID NO: 777 - protein, 7 aa, Chlamydomonas reinhardtii
YVWIIWV

SEQ ID NO: 778 - protein, 7 aa, Oryza sativa
YTWIIWV
